(19) United States
(12) Patent Application Publication
(10) Pub. No.: US 2020/0131526 A1
(43) Pub. Date: Apr. 30, 2020

(54) A TRANSGENIC PLANT HAVING RESISTANCE TO A PHYTO-PATHOGENIC FUNGUS

(71) Applicant: KWS SAAT SE, Einbeck (DE)

(72) Inventors: Holger DEISING, Halle (Saale) (DE); Ely OLIVEIRA GARCIA, Manhattan, KS (US); Dietmar STAHL, Einbeck (DE); Nora TEMME, Selm (DE)

(73) Assignee: KWS SAAT SE, Einbeck (DE)

(21) Appl. No.: 15/750,736

(22) PCT Filed: Aug. 2, 2016
(86) PCT No.: PCT/EP2016/068418

§ 371 Date: Feb. 6, 2018

(30) Foreign Application Priority Data
Aug. 7, 2015 (DE) 10 2015 010 050.5

(51) Int. Cl. C12N 15/82

(52) U.S. Cl. CPC C12N 15/8282; C12N 2310/11; C12N 2310/141

(57) ABSTRACT

The present invention is directed to a transgenic plant or a part thereof comprising a DNA capable of expressing an inhibitory nucleic acid molecule capable of inhibiting the expression of (a) KRE5 and/or KRE6 gene(s) in a fungus, to such DNA, to the inhibitory nucleic acid molecule, to a vector comprising the DNA, and to methods of producing the plant, of conferring fungal resistance to the plant, or of inhibiting the expression of the KRE5 and/or KRE6 gene(s) in a fungus, to the use of the DNA for inactivating a fungus, for protecting a plant against an infection by a fungus, or for inhibiting the expression of the KRE5 and/or KRE6 gene(s) in a fungus and to a composition comprising the DNA, vector or a dsRNA capable of inhibiting the expression of (a) KRE5 and/or KRE6 gene(s) in a fungus.

[0001] Crop plants are often infected by plant-pathogenic fungi. These infections lead to profit cuts of sometimes drastic proportions. So far, the problem of fungal infection has been addressed in the interest of good agricultural practice by the use of phytosanitary measures, fungicide treatment and introduction of resistance genes by classic crossing. These measures, however, do not show a permanent protection of plants from infection caused by phytopathogenic fungi because phytosanitary measures merely result in some decreased concentrations of infectious germs, fungicide treatments frequently implicate the formation of fungicide-resistant pathogens, and, as a rule, resistance genes newly introduced by crossing are broken after only a short period of time. Some years ago, a new genetic engineering method was developed using the expression of an RNA interference (RNAi) construct to provide for resistance to infection caused by plant-pathogenic fungi forming homologous mRNAs (see, e.g., U.S. Pat. No. 7,741,531 B2, Nowara et al. 2010, Plant Cell 22, 3130-3141). This method is referred to as “host-induced gene silencing” (HIGS).

[0002] The fungal cell wall is a scaffold protecting the fungal cell from osmolysis, providing the hyphae with a form and allowing for the adhesion and deposition of enzymes and UV-protective pigments. The pores of the cell wall regulate the entrance of large molecules into the organism and provide protection against lytic enzymes of foreign organisms. To some extent, phyto-pathogenic fungi form specific infection structures, appressoria, that are stabilized by strong cell walls and that by means of a high turgor pressure allow the pathogens to enter the host tissue.

[0003] Polysaccharides account for more than 90% of the fungal cell wall, with β-1,3-glucan covalently cross-linked to chitin forming the primary scaffold, to which other β-linked polysaccharides and proteins are attached. In most fungal species, β-1,3-linked glucan is the dominating polymer, comprising between 65 and 90% of the cell wall glucan fraction. The term glucan applies to several polymers of D-glucose bound by α- and β-linkages. β-1,3-glucans are complex polysaccharides, comprising β-1,6-branches, providing for the cross-linking of the β-1,3-glucan molecules. To date, the β-1,3-glucan branching process remains unclear.

[0004] In comparison to synthesis of chitin and β-1,3-glucan, and in spite of the considerable amount of work invested, the mechanism of synthesis of β-1,6-glucan is still hypothetical. The initial milestones in understanding of β-1,6-glucan synthesis originated from mutational screens for resistance to killer strains of yeast producing the pore-forming K1 killer toxin (Bussey, 1991, Mol. Micrbiol. 5: 2339-2343; Schmitt M J and Reiter J, 2008, Biochim. Biophys. Acta-Mol. Cell Res. 1783: 1413-1417). Killer toxin activity requires binding of the toxin to β-1,6-glucan.

[0005] As defects in β-1,6-glucan synthesis interfere with toxin binding and hence confer killer toxin resistance, β-1,6-glucan synthesis genes identified through these screens are referred to as KRE genes. Interestingly, localization of the proteins encoded by these genes showed that β-1,6-glucan synthesis is initiated in the endoplasmic reticulum (ER), progresses in the Golgi apparatus, and is completed at the cell surface (Boone et al., 1990, The Journal of Cell Biology 110: 1833-1843; Shahinian S and Bussey H, 2000, Mol. Microbiol. 35: 477-489), suggesting that β-1,6-glucan synthesis is secretory pathway-based. Today, several genes involved in β-1,6-glucan synthesis have been identified in yeast, including the two genes KRE5 and KRE6 (Shahinian and Bussey, 2000).

[0006] KRE5 encodes a luminal ER protein containing a C-terminal ER retention signal. Based on its limited but yet significant similarity to UDP-glucose:glycoprotein glucosyltransferases Kre5p has been proposed to function as a glucosyltransferase involved in initiation of β-1,6-glucan synthesis. However, UDP-glucose:glycoprotein glucosyltransferase activity catalyzing the attachment of a glucose residue to the N-glycosyl chains of target proteins in the ER has not been found in yeast (Fernandez et al, 1994, J. Biol. Chem. 269: 30701-30706). Alternatively, Kre5p has been proposed to be a glycosyltransferase which may β-1,6-glucosylate the glycosylphosphatidylinositol (GPI) moiety of cell wall proteins in the ER, which is eventually required for cross-linking of the cell wall network. Several lines of evidence support this hypothesis but unambiguous biochemical proof is still missing (Shahinian and Bussey, 2000). Although genetic and chemical data highlight the role of Kre5 in β-1,6-glucan synthesis, the biochemical activity and function of Kre5 remain hypothetical. KRE6 and its functional homolog SKN1 encode putative membrane-integral glucohydrolases localized in the Golgi apparatus. KRE6-deficient yeast mutants show a reduction of cell wall β-1,6-glucan contents by 50%. Kre6 and Skn1 show significant sequence similarity to several bacterial β-1,3-glucanases (Shahinian and Bussey, 2000, and references therein), suggesting that Kre6 may have a processing rather than an elaborating function.

[0007] Based on the localization and predicted function of Kre5 and Kre6 proteins, Shahinian and Bussey, 2000, introduced a model of transient glucosylation with addition of β-1,6-linked glucan residues in the ER by Kre5 and their removal in the Golgi by Kre6, with both steps being required for correct cell wall targeting, completion of β-1,6-glucan synthesis and cross-linking with other cell wall polymers on the cell surface.

[0008] β-1,3-glucans are attached to the plasma membrane by a glycoprotein complex called glycosylphosphatidylinositol (GPI)-proteins (Heilmann et al., 2012, PLoS Pathogens 8: e1003050). The most of the GPI-proteins synthesis process occurs in the ER and several proteins are involved in this process.

[0009] While significant effort has been taken to mechanistically unravel β-1,6-glucan synthesis, information on the role of this polymer and the genes required for its synthesis is limited to yeasts and dimorphic fungi with medical relevance. Notably, seven KRE family genes of the human pathogen Cryptococcus neoformans (Gilbert et al., 2010, Mol. Microbiol. 76: 517-534) are functionally characterized. As expected from the work with S. cerevisiae, Δkre5 and Δkre6Δskn1 mutants of this fungus had significantly reduced contents of β-1,6-glucan, and were sensitive to elevated temperature and chemicals interfering with cell wall synthesis such as Calcofluor White and Congo Red.

[0010] Thus, even though the function of β-1,6-glucan as well as the requirement of KRE5 and KRE6 for synthesis of this cell wall polymer and for virulence is documented in the above mentioned pathogens infecting mammals, the role of these genes in the infection process of filamentous plant pathogenic fungi is unknown. In contrast to fungi infecting animals, plant pathogens differentiate several morphologically distinct infection cells, depending on the lifestyle of the pathogen. Particularly, these infection structures show marked differences in composition and surface exposure of cell wall polymers (de Jonge et al., 2010, Science 329: 953-955; Oliveira-Garcia and Deising, 2013, Plant Cell 25: 2356-2378; Mentlak T A et al., 2012, Plant Cell 24: 322-335). Furthermore, it is unknown whether or not formation of β-1,6-links in cell wall glucan polymers is essential for cell wall function in infection structures. Furthermore, it is unknown whether or not infection structure-specific regulation of linear β-1,3- or branched β-1,3-β-1,6-glucans is required for the establishment of a compatible parasitic interaction with the host plant (Oliveira-Garcia and Deising, 2013).

[0011] Various working groups have examined biosynthesis genes of the fungal cell wall as to their suitability as potential target genes for an HIGS approach for pathogen resistance. The inhibition of chitin synthesis of Fusarium graminearum by HIGS in transgenic wheat plants resulted in an increased resistance specifically against F. graminearum (Cheng et al., 2015) (Plant Biotechnology Journal, doi: 10.1111/pbi.12352). In their scientific paper, Nowara et al. 2010 addressed pathogenic target genes that are relevant for cell wall biogenesis with HIGS constructs in plants. In that case, these were the two β-1,3-glucanosyl transferases GTF1 and GTF2 of the corn mildew virus Blumeria graminis. These genes, however, are not well suited for HIGS use, since almost all examined fungi with annotated genome have at least two β-1,3-glucanosyl transferases and these enzymes are involved only in late stages of the cell wall biosynthesis. These two reasons suggest that β-1,3-glucanosyl transferase genes are not HIGS candidate genes that could be preferably and successfully used in molecular plant cultivation.

[0012] There exists, thus, the need for an appropriate fungal target gene, which is suitable to confer broad and permanent fungal resistance to plants.

[0013] In a first aspect, the present invention relates to a transgenic plant or a part thereof comprising as transgene a DNA capable of expressing an inhibitory nucleic acid molecule capable of inhibiting the expression of (a) KRE5 and/or KRE6 gene(s) in a fungus.

[0014] In an embodiment thereof, the transgenic plant or the part thereof comprises as transgene an expression cassette comprising the DNA.

[0015] In an embodiment thereof, the DNA or the expression cassette is stably integrated into the genome of the plant or present in the plant or the part thereof on a vector.

[0016] In an embodiment thereof, the inhibitory nucleic acid molecule is an antisense RNA or dsRNA, whereby the dsRNA is preferably hpRNA, siRNA or miRNA.

[0017] In an embodiment thereof, the DNA encodes an RNA molecule in sense direction and an RNA molecule in antisense direction, wherein the RNA molecule in sense direction or the RNA molecule in antisense direction are substantially complementary or reverse complementary to the KRE5 and/or KRE6 gene(s) or part(s) thereof, in particular the RNA molecule in antisense direction is substantially reverse complementary to the RNA molecule in sense direction, and the RNA molecule in sense direction and the RNA molecule in antisense direction are able to build a dsRNA.

[0018] In an embodiment thereof, the length of the antisense RNA, the dsRNA, the RNA molecule in sense direction or the RNA molecule in antisense direction is at least 15, 16, 17, 18, 19 or 20 contiguous nucleotides, preferably at least 21, 22, 23, 24, 25, 30, 40, 50, 60, 70, 80, 90 or 100 contiguous nucleotides, and more preferably at least 150, 200, 250, 300, 350, 450, 500, 600, 700, 800, 900 or 1000 contiguous nucleotides. The upper limit of the molecule is determined by the length of the KRE5 and KRE6 genes or mRNAs. Most preferably, the length is 300-2000, such as 200-1000, 300-700, 400-500, 440-470, or 450-460 contiguous nucleotides. Exemplarily, the length may be around 455 contiguous nucleotides such as 456 contiguous nucleotides.

[0019] Consequently, by “part” of the KRE5 and/or KRE6 gene(s) is meant any part of the genes to which an aRNA or an RNA molecule in antisense direction hybridizes and inhibits expression thereof. According to the above, the “part” of the genes may be at least 15, 16, 17, 18, 19 or 20 contiguous nucleotides, preferably at least 21, 22, 23, 24, 25, 30, 40, 50, 60, 70, 80, 90 or 100 contiguous nucleotides, and more preferably at least 150, 200, 250, 300, 350, 450, 500, 600, 700, 800, 900 or 1000 contiguous nucleotides in length, but is below the length of the KRE5 and KRE6 genes or mRNAs. Most preferably, the length is 300-2000, such as 200-1000, 300-700 or 400-500 contiguous nucleotides. Exemplarily, the length may be around 450 contiguous nucleotides such as 456 contiguous nucleotides. The “part” of the genes may be in any region of the KRE5 gene or KRE6 gene or of the KRE5 mRNA or KRE6 mRNA, so that upon hybridizing of the aRNA or RNA molecule in antisense direction, the transcription of the gene or the translation of the mRNA is inhibited. The “part” may be in a regulatory region such as the promoter region or terminator regulatory sequence, in exon sequences, in intron sequences or along the whole mRNA, as long as the transcription of the gene or the translation of the mRNA is inhibited.

[0020] In an embodiment thereof, the expression of the inhibitory nucleic acid molecule is controlled by a promoter, preferably an inducible promoter, more preferably a pathogen inducible and/or tissue specific promoter. The inducible promotor can be a chimeric promoter which is composed of a plurality of elements and does not occur as such nature. It may contain a minimal promoter and include, upstream from the minimal promoter, at least one cis-regulatory element which serves as a binding site for specific trans-acting factors (e.g. transcription factors). A chimeric promoter can be designed according to the desired requirements and is induced or repressed by different factors. The selection of the cis-regulatory element or a combination of cis-regulatory elements is critical for the specificity or the activity level of a promoter. A cis-regulatory element in a chimeric promoter is either heterologous to the minimal promoter used, i.e. the cis-regulatory element is derived from a different organism or from a different species to that of the minimal promoter used, or a cis-regulatory element in a chimeric promoter is homologous to the minimal promoter used, i.e. the cis-regulatory element and the minimal promoter also occur combined in a natural promoter, however the cis-regulatory element is localized itself or as an additional element within the chimeric promoter in a genetic environment that is different from the natural promoter. A chimeric promoter thus also means a (natural) promoter that was altered by multimerization of at least one cis-regulatory element. Pathogen inducible chimeric promoters are known from the prior art (WO 00/29592; WO 2007/147395; WO 2013/091612).

[0021] Each of the embodiments of the first aspect refers back to each preceding embodiment.

[0022] In a second aspect, the present invention relates to a DNA capable of expressing an inhibitory nucleic acid molecule capable of inhibiting the expression of (a) KRE5 and/or KRE6 gene(s) in a fungus, whereby preferably the DNA is as defined above in the first aspect of the invention, or an expression cassette comprising the DNA.

[0023] In a third aspect, the present invention relates to an inhibitory nucleic acid molecule capable of inhibiting the expression of (a) KRE5 and/or KRE6 gene(s) in a fungus, whereby preferably the inhibitory nucleic acid molecule is as defined above in the first aspect of the invention.

[0024] In a fourth aspect, the present invention relates to a vector comprising the DNA or the expression cassette as referred to in the second aspect of the invention.

[0025] In a fifth aspect, the present invention relates to a method of producing the transgenic plant or the part thereof as referred to in the first aspect of the invention, comprising the following steps: introducing into at least a cell of the plant the DNA or the expression cassette as referred to in the second aspect of the invention or the vector as referred to in the fourth aspect of the invention, and regenerating the transgenic plant from the at least one cell.

[0026] In a sixth aspect, the present invention relates to a method of conferring fungal resistance to a plant or the part thereof comprising the following steps: introducing into the plant or the part thereof the DNA or the expression cassette as referred to in the second aspect of the invention or the vector as referred to in the fourth aspect of the invention, and causing expression of the DNA or the expression cassette.

[0027] In a seventh aspect, the present invention relates to a method of inhibiting the expression of the KRE5 and/or KRE6 gene(s) in a fungus, comprising: applying the DNA or the expression cassette as referred to in the second aspect of the invention or the vector as referred to in the fourth aspect of the invention to the fungus or to a plant or a part thereof.

[0028] In an eight aspect, the present invention relates to a use of the DNA or the expression cassette as referred to in the second aspect of the invention or the vector as referred to in the fourth aspect of the invention for inactivating a fungus, while contacting a plant or a part thereof; for protecting a plant against an infection by a fungus; or for inhibiting the expression of the KRE5 and/or KRE6 gene(s) in a fungus.

[0029] In a ninth aspect, the present invention relates to a composition comprising the DNA or the expression cassette as referred to in the second aspect of the invention or the vector as referred to in the fourth aspect of the invention or a dsRNA capable of inhibiting the expression of (a) KRE5 and/or KRE6 gene(s) in a fungus.

[0030] The invention also relates to a transgenic plant or a part thereof comprising a DNA or an expression cassette comprising the DNA, wherein the DNA encodes an aRNA or dsRNA directed against the KRE5 DNA and/or mRNA, wherein preferably the dsRNA is hpRNA, siRNA or miRNA, or the aRNA is part of the dsRNA, siRNA or miRNA.

[0031] The invention also relates to a transgenic plant or a part thereof comprising a DNA or an expression cassette comprising the DNA, wherein the DNA encodes an aRNA or dsRNA directed against the KRE6 DNA and/or mRNA wherein preferably the dsRNA is hpRNA, siRNA or miRNA, or the aRNA is part of the dsRNA, siRNA or miRNA.

[0032] The invention also relates to a transgenic plant or a part thereof comprising a DNA or an expression cassette comprising the DNA, wherein the DNA encodes an aRNA or dsRNA directed against the KRE5 and an aRNA or dsRNA directed against the fungal KRE6 DNA and/or mRNA, wherein preferably the dsRNA is hpRNA, siRNA or miRNA, or the aRNA is part of the dsRNA, siRNA or miRNA.

[0033] The invention also relates to a transgenic plant or a part thereof comprising a DNA or an expression cassette comprising the DNA, wherein the DNA comprises an antisense and a sense sequence whereby the antisense sequence is capable of hybridizing to fungal KRE5 mRNA.

[0034] The invention also relates to a transgenic plant or a part thereof comprising a DNA or an expression cassette comprising the DNA, wherein the DNA comprises an antisense and a sense sequence whereby the antisense sequence is capable of hybridizing to fungal KRE6 mRNA.

[0035] The invention also relates to a transgenic plant or a part thereof comprising a DNA or an expression cassette comprising the DNA, wherein the DNA comprises an antisense sequence against the KRE5 mRNA and an antisense sequence against the KRE6 mRNA and preferably sense sequences thereto, wherein the antisense sequences are capable of hybridizing to fungal KRE5 mRNA and KRE6 mRNA, respectively.

[0036] The invention also relates to a transgenic plant or a part thereof comprising a DNA or an expression cassette comprising the DNA, wherein the DNA encodes an RNA molecule in sense direction and an RNA molecule in antisense direction, wherein the RNA molecule in sense direction or the RNA molecule in antisense direction are present on one RNA molecule.

[0037] The invention also relates to a transgenic plant or a part thereof comprising a DNA or an expression cassette comprising the DNA, wherein the DNA encodes an RNA molecule in sense direction and an RNA molecule in antisense direction, wherein the RNA molecule in sense direction or the RNA molecule in antisense direction are present on different RNA molecules.

[0038] The invention also relates to a transgenic plant or a part thereof comprising a DNA or an expression cassette comprising the DNA, wherein the DNA encodes an RNA molecule in sense direction and an RNA molecule in antisense direction, wherein the RNA molecule is siRNA or miRNA.

[0039] While the requirement for KRE5 and KRE6 for synthesis of β-1,6-glucan and for virulence is well-known in the art with respect to mammals, there was to date no data whether KRE5 and KRE6 would also play a role with respect to pathogens infecting plants. Moreover, there was to date no data as to the suitability of KRE5 and KRE6 as target genes in gene silencing approaches, let alone in an HIGS approach, for broad and permanent pathogen resistance in plants.

[0040] The present inventors have surprisingly demonstrated that inhibition of fungal KRE5 and/or KRE6 gene(s) by a polynucleotide introduced into a plant confers resistance in the plant to fungi via gene silencing. The polynucleotide causes cessation of infection, growth, development, reproduction and/or pathogenicity and eventually results in the death of the fungal organism.

[0041] The invention demonstrates for the first time that the disturbance of the β-1,6-glucan synthesis in a phyto-pathogenic fungus providing for the cross-linking of the β-1,3-glucan chains leads to a massive inhibition of fungal growth, a reduced formation of conidia and to apathogenicity. It has been shown that the KRE5-encoded UDP glucose glycosyl transferase catalyzes the first biosynthesis step of the β-1,6-glucan synthase and that KRE6 encodes a protein involved in the synthesis of both β-1,3-glucan and β-1,6-glucan. As an example, the KRE5 and KRE6 genes of Colletotrichum graminicola were isolated. The identity of the genes was functionally confirmed by the complementation of the yeast mutants Δkre5 and Δkre6 for C. graminicola. Analoguously, the same procedure may be applied to the KRE5 and KRE6 genes of other pathogens. Surprisingly, the separate inhibition of the KRE5 expression and the KRE6 expression in C. graminicola strains resulted not only in the reduction of β-1,6-glucan synthesis but also in a decrease of β-1,3-glucan synthesis via a decreased transcription of GLS1. Based on the co-regulation of the β-1,3-glucan and β-1,6-glucan syntheses that was observed for the first time, the use of the KRE5 and/or KRE6 gene(s) as HIGS target genes is more effective than the use of GLS1 alone.

[0042] Moreover, by using reverse genetic methods, the inventors were able to show that the KRE5 and KRE6 genes are excellent HIGS target genes capable of selectively interrupting the beta-1,6-glucan biosynthesis and suitable for generating plants permanently resistant against pathogens. The excellent suitability of these target genes is substantiated by several properties. Firstly, these are single-copy genes such that in case of an RNAi approach it can be excluded that a second allele will save the host-induced gene silencing. Secondly, these are genes that are engaged in very early stages of the cell wall biosynthesis so that no polymer precursors develop that would be able to partially save the HIGS phenotype. Thirdly, and this is a crucial point, no complete reduction of transcript concentrations is required in order to induce apathogenicity.

[0043] The identified genes may serve to generate plants that address individual target genes or also plants that use combinations of the presently presented genes of plant-pathogenic fungi as targets. Since the reverse-genetically verified genes identified herein have homologues in the genomes of all economically relevant fungi, these targets may be used to confer permanent resistance to various crop species against a wide variety of plant-pathogenic fungi.

[0044] KRE5 and KRE6 nucleic acid and amino acid sequences are known in the art for a series of fungi. The protein and nucleotide sequences of a series of fungal KRE5 and KRE6 are listed in the accompanying sequence listing under SEQ ID NOs: 1 to 232, 375 and 376.

[0045] KRE5 and KRE6 proteins of filamentous fungi show a sequence identity of about at least 60% and 69%, respectively, however, protein sequences largely differ between various clades and may be as low as 23% and 30%, respectively, between S. cerevisiae and C. graminicola. According to the present invention, KRE5 and KRE6 genes which are comprised by the present invention as target genes in gene silencing approaches are those which are known in the art as fungal KRE5 and KRE6 genes, respectively. In the exemplary part a series of KRE5 genes and KRE6 genes and proteins in various fungi are listed and characterized by their accession numbers as available from the NCBI database (National Centre for Biotechnology Information; National Library of Medicine 38A, Bethesda, Md. 20894, USA; www.ncbi.nih.gov). Moreover, fungal KRE5 and KRE6 genes which are comprised by the present invention as target genes are characterized by their degree of identity to already known KRE5 and KRE6 genes. Thereby, fungal KRE5 and KRE6 genes are comprised as target genes by the present invention if they show a degree of identity to already known, or to those identified in the future, KRE5 and KRE6 genes of fungal organisms of at least 60, 70, 80, 90, 95 or 99%. Alternatively, fungal KRE5 and KRE6 genes are comprised by the present invention as target genes if they hybridize under stringent conditions to a fungal KRE5 and KRE6 gene, respectively, as known in the art. Additionally, a KRE5 protein encoded by a KRE5 target gene as comprised by the present invention has UDP glucose glycosyltransferase activity and catalyses the first biosynthesis step of the β-1,6-glucan synthesis. All KRE5 proteins are characterized by a clear secretion signal at the N-terminal region and two different glycosyltransferase domains at the conserved C-terminal region. All KRE5 proteins contain a C-terminal tetrapeptide for retention in the endoplasmic reticulum. Moreover, all Colletotrichum species and Neurospora crassa show an IDEL C-terminal tetrapeptide, the majority of filamentous ascomycetes shows a KDEL and dimorphic fungi show preferentially a HDEL C-terminal tetrapeptide. A KRE6 protein encoded by a KRE6 target gene as comprised by the present invention is a membrane-integral glycohydrolase protein. The vast majority of KRE6 proteins contain a single transmembrane domain at the N-terminal region and a prominent central glycohydrolase 16/KRE6 core domain.

[0046] Alternativley, identification of a KRE5 or KRE6 protein may occur via a consensus sequence. Alignment of protein sequences of various fungi of the ascomycota and basidiomycota revealed conserved sequences, in particular in the UDP-glucose:glycoprotein glucosyltransferase domain and the glucosyl-transferase family 8-like domain of the KRE5 protein and in the glycosyl hydrolases family 16 domain of the KRE6 protein. Based on homologous regions, consensus sequences can be designed which may be used to identify KRE5 or KRE6 proteins in other fungi, preferably in other fungi of the ascomycota and basidiomycota categories. Accordingly, KRE5 and KRE6 genes which are comprised by the present invention as target genes in gene silencing approaches are those which comprise consensus sequences identified as indicated above, preferably which comprise consensus sequences derived from the UDP-glucose:glycoprotein glucosyltransferase domain and/or the glucosyltransferase family 8-like domain of the KRE5 protein or the glycosyl hydrolases family 16 domain of the KRE6 protein.

[0047] As used herein, a fungus is any fungus comprising (a) KRE5 and/or KRE6 gene(s). Preferably, the fungus is selected from the group consisting of ascomycota, basidiomycota, zygomycota, chytridiomycota, blastocladiomycota, neocallimastigomycota, and glomeromycota. More preferably the fungus is a phytopathogenic fungus. Still more more preferably the fungus is selected from a genus comprising the KRE5 gene such as the genus Alternaria; Ashbya; Beauveria; Bipolaris; Botryotinia; Colletotrichum; Cladosporium; Claviceps; Cordyceps; Cryptococcus; Diplocarpon; Fusarium; Gaeumannomyces; Geotrichum; Leptosphaeria; Magnaporthe; Metarhizium; Neurospora; Pyrenophora; Puccinia; Trichoderma; Sclerotinia; Ustilago; Verticillium; Zygosaccharomyces; Blumeria; Chaetomium; Chaetomium; Endocarpon; Exophiala; Lachancea; Marssonina; Myceliophthora; Mycosphaerella; Macrophomina; Penicillium; Podospora; Paracoccidioides; Pseudopeziza; Pyrenophora; Phaeosphaeria; Sclerotinia; Sordaria; Schizsacchaormyces, Zygosaccharomyces; Talaromyces; Thielavia; Trichoderma; Venturia, and Pseudocercospora; and still more preferably the fungus is selected from Alternaria solani; Aspergillus flavus; Alternaria alternata; Aphanomyces cochlioides; Ashbya gossypii; Beauveria bassiana; Bipolaris maydis; Bipolaris sorokiniana; Botryotinia fuckeliana; Botrytis cinerea; Cercospora beticola, Cercospora kikuchii; Cercospora sojina; Cercospora zea maydis; Colletotrichum graminicola; Colletotrichum gloeosporioides; Colletotrichum orbiculare; Claviceps purpurea; Cordyceps militaris; Diplodia maydis; Drechslera glycines; Drechsiera oryzae; Erysiphe betae; Exserohilum turcicum; Fusarium fujikuroi; Fusarium graminearum; Fusarium moniliforme; Fusarium oxysporum; Fusarium solani; Gaeumannomyces graminis; Leptosphaeria maculans; Magnaporthe oryzae; Microsphaera diffusa; Penicillium; Pyrenophora teres; Pyrenophora tritici-repentis; Puccinia graminis; Trichoderma virens; Sclerotinia sclerotiorum; Ustilago maydis; Ustilago hordei; Verticillium alfalfa; Verticillium dahlia; or the fungus is selected from a genus comprising the KRE6 gene such as Blumeria graminis; Chaetomium globosum; Colletotrichum higginsianum; Colletotrichum orbiculare; Coccidioides posadasi; Endocarpon pusillum; Exophiala dermatitidis; Lachancea thermotoleran; Marssonina brunnea; Myceliophthora thermophile; Metarhizium acridum; Macrophomina phaseolina; Monographella albescens; Paracoccidioides brasiliensis; Phaeoshaeria maydis; Phakopsora pachyrhizi; Pyrenophora tritici-repentis; Phaeosphaeria nodorum; Puccinia graminis; Puccinia polysora; Puccinia striiformis; Puccinia triticina; Pyricularia oryzae; Ramularia beticola, Rhizoctonia oryzae; Rhizoctonia solani; Sclerotium rolfsii; Saccharomyces arboricola; Sordaria macrospora; Schizsacchaormyces japonicus, Zygosaccharomyces rouxii; Talaromyces marneffei; Talaromyces stipitatus; Thielavia terrestris; Venturia inaequalis; Verticillium albo-atrum; Verticillium dahlia; Zymoseptoria tritici; and Pseudocercospora fijiensis. The fungus may also be selected from the genus Candida such as Candida albicans; Candida glabrata; Candida orthopsilosis; Candida parapsilosis; or Candida tropicalis; Saccharomyces; and Coccidioides. KRE5 and/or KRE6 gene(s) of non-phytopathogenic fungi, as e.g. mentioned herein, may serve in the finding of not yet identified KRE5 and/or KRE6 gene(s) of phytopathogenic fungi, e.g. via consensus sequences.

[0048] Also included within the term “fungus” are fungus-like eukaryotic microorganisms such as the oomycota or oomycetes which include notorious pathogens of plants, causing devastating diseases such as late blight of potato and sudden oak death. Examples of oomycetes which are included by the present invention are Phytophthora infestans, Phytophthora palmivora, Phytophthora sojae. Oomycetes are included within the present invention and are, for the purposes of the present invention, included within the term “fungal” or “fungus”.

[0049] As used herein, the term “phyto-pathogenic” or “pathogenic” refers to a fungus which causes a disease in a plant.

[0050] The methods as comprised by the present invention which are used to inhibit the expression of KRE5 and/or KRE6 gene(s) in a fungus are known to the skilled person under the term “gene silencing”. “Gene silencing” is a general term used to describe the regulation of gene expression. In particular, this term refers to the ability of a cell to prevent the expression of a gene in the cell. Gene silencing can occur during either transcription or translation of a gene. The application of gene silencing methods in plants is well known in the art. Reference is made to Plant Gene Silencing—Methods and Protocols, Mysore K. S and Senthil-Kumar M. (eds.), Springer Protocols, Humana Press, 2015, which provides the reader with a comprehensive review of various gene silencing methodologies and its applications. The skilled person may apply any methods described in this document or elsewhere which are suitable to achieve gene silencing in a plant and in a fungus.

[0051] Generally used gene silencing methodologies in plants include host-induced gene silencing (HIGS) which is a method where a plant controls pathogens by RNA interference (RNAi) and exhibits an enhanced resistance when carrying suitable gene silencing constructs. RNA interference is a natural process used by cells in many eukaryotes to regulate gene expression. RNA interference is a vital part of the immune response to viruses and other foreign genetic material, especially in plants. For inducing RNAi in a cell or organism, dsRNA with a sequence substantially complementary to a gene of interest is synthesized either within a cell or organism or it is synthesized outside the cell or organism and introduced into the cell or organism, where it is recognized as exogenous genetic material and activates the RNAi pathway. The double-stranded molecule is cut into small double-stranded fragments by an enzyme called Dicer. These small fragments, which include small interfering RNAs (siRNA) and microRNA (miRNA), are often 19-40 nucleotides in length. The fragments integrate into a multi-subunit protein called the RNAi induced silencing complex (RISC). One strand of the molecule, the guide strand or antisense strand, binds to RISC, while the other strand, the passenger strand or sense strand, is degraded. The guide strand pairs with a complementary sequence in an mRNA molecule and induces cleavage by Argonaute, the catalytic component of the RISC complex, thereby preventing it from being used as a translation template.

[0052] Other gene silencing methodologies in plants use antisense oligonucleotides which are short nucleic acid fragments that bind to substantially complementary target mRNA molecules. These molecules are single-stranded RNA molecules generally 15-25 nucleotides long. Gene silencing in plants can also occur via ribozymes which are catalytic RNA molecules used to inhibit gene expression. These molecules work by catalyzing specific biochemical reactions such as cleaving mRNA molecules. Several types of ribozyme motifs exist, including hammerhead, hairpin, hepatitis delta virus, group I, group II, leadzyme, Varkud satellite (VS) and RNase P ribozymes. The general catalytic mechanism used by ribozymes is similar to the mechanism used by protein ribonucleases. These catalytic RNA molecules bind to a specific site and attack the neighboring phosphate in the RNA backbone with their 2′ oxygen, which acts as a nucleophile, resulting in the formation of cleaved products with a 2′3′-cyclic phosphate and a 5′ hydroxyl terminal end.

[0053] The preferred method used in the present invention is the HIGS method. Moreover, any other gene silencing method known in the art may be used for inhibiting the expression of a fungus while being in contact with a plant.

[0054] For the production of fungus resistant plants in the present invention, a DNA capable of expressing an inhibitory nucleic acid molecule capable of inhibiting the expression of (a) KRE5 and/or KRE6 gene(s) in a fungus is selected and introduced into the plant or a part thereof.

[0055] As used herein, “a DNA capable of expressing an inhibitory nucleic acid molecule” is any DNA molecule which results in an inhibitory nucleic acid molecule. Preferably, the DNA comprises an antisense sequence which is substantially complementary to contiguous stretches of the fungal KRE5 and/or KRE6 mRNA(s) or part(s) thereof. Upon transcription, an inhibitory molecule, preferably an RNA molecule, is produced which comprises the antisense sequence which is capable of hybridizing to the fungal KRE5 and/or KRE6 mRNA(s) or part(s) thereof. The RNA molecule may be an mRNA molecule, a single-stranded antisense RNA, or a dsRNA, for example a hpRNA, siRNA or miRNA. The DNA may comprise one or more than one antisense sequence(s). Thus, the DNA may comprise one or more than one antisense sequence(s) against fungal KRE5 gene(s) and/or RNA(s), or one or more than one antisense sequence(s) against fungal KRE6 gene(s) and/or RNA(s), or one or more than one antisense sequence(s) against fungal KRE5 and one or more than one antisense sequence(s) against fungal KRE6 gene(s) and/or RNA(s). Additionally and preferably, the DNA may comprise one or more than one sense sequence(s) which is (are) substantially complementary to the antisense sequence(s). The antisense and sense sequences may be present on the same or on different DNA strands. Upon transcription, inhibitory molecule(s) comprising the antisense and possibly sense sequences are generated. Alternatively, the DNA may encode a catalytic RNA or ribozyme or may encode an inhibitory nucleic acid molecule which is or encodes a repressor molecule. Such a repressor molecule may, e.g., act by inhibiting the access of proteins, which are necessary for transcription or translation, to the fungal KRE5 and/or KRE6 gene(s) and/or RNA(s). The DNA may be double-stranded or single-stranded and is preferably double-stranded.

[0056] The DNA capable of expressing an inhibitory nucleic acid molecule may be present within an expression cassette. As used herein, an “expression cassette” is a nucleic acid molecule which is composed of one or more genes or genetic sequences and the sequences controlling their expression. An expression cassette may contain a promoter regulatory sequence, also designated promoter, operably linked to an open reading frame or another genetic sequence, and a 3′ untranslated region that may contain a polyadenylation site. The promoter directs the machinery of the cell to make RNA and/or protein. As used herein, “operably linked” means that expression of the linked DNA sequences occurs in the plant. An expression cassette may be part of a vector used for cloning and introducing the DNA into a cell.

[0057] As used herein, an “antisense sequence” is a sequence which is substantially complementary to any contiguous stretch of (a) fungal KRE5 and/or KRE6 mRNA(s) or part(s) thereof. The antisense sequence is selected such that it hybridizes to a contiguous sequence element of the KRE5 and/or KRE6 mRNA(s) and inhibits the translation thereof. The antisense sequence has a length which allows inhibition of translation of the KRE5 and/or KRE6 mRNA(s) in the fungus. The antisense sequence as comprised by an aRNA which inhibits the KRE5 and/or KRE6 mRNA(s) via the antisense mechanism has a length of at least 15 nucleotides and may extend to hundreds of nucleotides or over the whole length of the KRE5 or KRE6 mRNA(s). The preferred length of the antisense sequence as comprised by an aRNA is 15 to 300, 15 to 200, 15 to 100 or 15 to 50 nucleotides and most preferably 15 to 25 nucleotides. The antisense sequence as comprised by dsRNA which induces the RNAi machinery has a length of at least 19 nucleotides and may extend to hundreds of nucleotides or over the whole length of the KRE5 or KRE6 mRNA(s). The preferred length of the antisense sequence as comprised by dsRNA is 19 to 300, 19 to 200, 19 to 100 or 19 to 50 nucleotides and most prefereably 19 to 25 nucleotides. The antisense sequence may be directed against the coding part or the regulatory part of the fungal KRE5 and/or KRE6 mRNA(s).

[0058] The selection of a suitable antisense sequence can be performed by methods known in the art. For RNAi constructs, RNAi programs like Emboss siRNA prediction (http://emboss.sourceforge.net/apps/release/6.6/emboss/apps/sirna.html) are available which identify suitable sequence elements of the KRE5 and/or KRE6 genes.

[0059] As used herein, a “sense sequence” is a sequence which is substantially complementary to an antisense sequence. Due to the substantial complementarity of the sequences, the antisense and sense sequences hybridize with each other.

[0060] The term “complementary” includes “complementary” as well as “reverse complementary”. “Reverse complementary” means that the nucleotides of a reverse complementary sequence are, as regards their 5′ to 3′ extension, complementary and ordered in a mirrored fashion with respect to a polynucleotide sequence. Thus, independent of whether antisense and sense sequences are on the same strand or on different strands (DNA or RNA), they need to be reverse complementary allowing them to form a double-strand either by intramolecular hybridization or inter-molecular hybridization, respectively.

[0061] The term “capable of expressing” means that the DNA is the starting substance which is transferred within the plant cell into a nucleic acid molecule which is capable of inhibiting the expression of (a) KRE5 and/or KRE6 gene(s) in a fungus. Preferably, this term comprises the transcription of the DNA into an RNA molecule, which can hybridize to (a) KRE5 and/or KRE6 gene(s) or (a) KRE5 and/or KRE6 mRNA(s) in a fungus and inhibit the expression thereof.

[0062] As used herein, “an inhibitory nucleic acid molecule” or “an inhibitory nucleic acid molecule capable of inhibiting the expression of (a) KRE5 and/or KRE6 gene(s)” is any nucleic acid molecule which inhibits the transcription and/or translation of (a) KRE5 and/or KRE6 gene(s) or (a) KRE5 and/or KRE6 RNA(s) in a fungus. Inhibition may occur in the coding part of the KRE5 and/or KRE6 gene(s) or KRE5 and/or KRE6 RNA(s) in the fungus or the regulatory part located in the regions 5′ and/or 3′ to the gene(s) or RNA(s). Preferably, the inhibition is by hybridizing to (the) KRE5 and/or KRE6 DNA(s) or mRNA(s) in the fungus due to substantial complementarity, so that the KRE5 and/or KRE6 DNA(s) and/or RNA(s) cannot be transcribed and/or translated, respectively. Inhibition may also be achieved by degrading the hybridized KRE5 and/or KRE5 gene(s) or RNA(s). Preferably, the inhibitory nucleic acid molecule is an RNA molecule which is transcribed from the DNA capable of expressing an inhibitory nucleic acid molecule. More preferably, the inhibitory nucleic acid molecule is a single-stranded antisense RNA (aRNA) which comprises an antisense sequence which is substantially complementary to the fungal KRE5 and/or KRE6 mRNA(s) and which hybridizes thereto and inhibits the translation thereof. Alternativley, the inhibitory nucleic acid is an RNA molecule in sense direction and an RNA molecule in antisense direction. The RNA molecule in sense direction and the RNA molecule in antisense direction may be one RNA molecule or may be different RNA molecules. Due to their inverse substantial complementarity, the sense and antisense sequences hybridize with each other and form dsRNA. The dsRNA such as siRNA or miRNA may be composed of two separate strands or may be one strand such as hpRNA. In a further alternative, the inhibitory nucleic acid molecule is a dsRNA, namely siRNA or miRNA, which forms within the plant during the RNAi procedure, whereby dsRNA transcribed from the DNA induces the RNAi mechanism and is processed to the siRNA or miRNA. Alternatively, the inhibitory molecule may be a catalytic RNA or ribozyme. In a further alternative, the inhibitory nucleic acid molecule may be or encode a repressor molecule which functions by inhibiting the transcription and/or translation of the KRE5 and/or KRE6 gene(s) and/or RNA(s) in the fungus. For example, the repressor molecule functions by inhibiting the access of proteins, which are necessary for transcription or translation, to the fungal KRE5 and/or KRE6 gene(s) and/or RNA(s).

[0063] As used herein, the term “capable of inhibiting the expression of (a) KRE5 and/or KRE6 gene(s)” or “inhibiting the expression of (a) KRE5 and/or KRE6 gene(s)” means that the inhibitory nucleic acid molecule prevents that the fungal KRE5 and/or KRE6 gene(s) or mRNA(s) are processed further, such as transcribed or translated. Prevention may occur by any kind of inhibition such as hybridization to the KRE5 and/or KRE6 gene(s) and/or RNA(s), cleaving of the KRE5 and/or KRE6 gene(s) and/or RNA(s), repressing the transcription or translation of the KRE5 and/or KRE6 gene(s) and/or RNA(s) or catalytic actions as performed by ribozymes. Preferably, the nucleic acid molecule can hybridize or hybridizes to (a) KRE5 and/or KRE6 gene(s) and/or (a) KRE5 and/or KRE6 mRNA(s) and prevents the further processing thereof such as transcription of DNA or translation of mRNA. Prevention occurs either by blocking the KRE5 and/or KRE6 gene(s) or mRNA(s) so that downstream actions cannot be performed or by degrading the KRE5 and/or KRE6 gene(s) or mRNA(s) by host-specific enzymes. A reduction of expression of at least 40%, 50%, 60%, 70%, 80%, 90%, 95% or of 100% for the KRE5 gene and/or of at least 40%, 50%, 60%, 70%, 80%, 90%, 95% or of 100% for the KRE6 gene, as compared to expression in a non-transgenic plant of identical phenotype, allows scoring the transgenic plant as being resistant or as having resistance to a fungus. Preferably, the damages on the plant are reduced by at least 50%, 60%, 70%, 80%, 90% or by 100% in a resistant transgenic plant according to the present invention as compared to a non-transgenic plant of identical phenotype. Inhibition of expression of (a) KRE5 and/or KRE6 gene(s) results in the reduction of β-1,6-glucan synthesis and a decrease of β-1,3-glucan synthesis via a decreased transcription of GLS1.

[0064] Each fungus has its characteristic picture of damages which it causes with a host plant. The damages are e.g. visible in the form of leaf spots or root rot (dry texture, concentric rings, discoloration and fruiting structures) or vascular wilt (gradual wilting of the above ground shoots). Other signs are the presence of mycelium and fruiting bodies which range in size from microscopic to easily detectable with the eye. They are found within the leaf spot or stem rot area. The skilled person knows other forms of damages which are caused by fungi on plants. The extent of damages can e.g. be determined by determining the relative area of spots on the plant leaves.

[0065] The term “KRE5 and/or KRE6” means either KRE5 or KRE6 or both of KRE5 and KRE6. Thus, the term “(a) KRE5 and/or KRE6 gene(s)” or “(a) KRE5 and/or KRE6 RNA(s)” or similar terms means either a KRE5 gene or a KRE6 gene or both of the KRE5 and KRE6 genes or a KRE5 RNA or a KRE6 RNA or both of the KRE5 and KRE6 RNAs. Consequently, “a DNA capable of expressing an inhibitory molecule” or “an inhibitory molecule” may comprise the nucleic acid against the KRE5 gene or the KRE6 gene or both of the KRE5 and KRE6 genes or against the KRE5 RNA or the KRE6 RNA or both of the KRE5 and KRE6 RNAs. Consequently, the plant of the present invention incorporates a DNA molecule or inhibitory nucleic acid or antisense sequence against the KRE5 gene or the KRE6 gene or both of the KRE5 and KRE6 genes or against the KRE5 RNA or the KRE6 RNA or both of the KRE5 and KRE6 RNAs. The terms “KRE5” and “kre5” and the terms “KRE6” and “kre6” are interchangeably used.

[0066] The term “expression of (a) KRE5 and/or KRE6 gene(s)” means (1) the transcription of (a) KRE5 and/or KRE6 gene(s) into (a) KRE5 and/or KRE6 RNA(s) and/or (2) the translation of (a) KRE5 and/or KRE6 RNA(s) into (a) KRE5 protein and/or KRE6 protein(s).

[0067] As used herein, an “antisense RNA” or “aRNA” is a single-stranded RNA which comprises an antisense sequence which is substantially complementary to (the) KRE5 and/or KRE6 mRNA(s) which is (are) transcribed in the fungus. The aRNA binds to KRE5 and/or KRE6 mRNA(s) produced by the fungus by base-pairing, thereby obstructing the translation machinery and inhibiting translation and further processing. Consequently, the production of KRE5 and/or KRE6 protein(s) is inhibited.

[0068] As used herein, an “RNA molecule in antisense direction” is an RNA molecule which comprises an antisense sequence.

[0069] As used herein, an “RNA molecule in sense direction” is an RNA molecule which comprises a sense sequence. An RNA molecule in antisense direction and an RNA molecule in sense direction may be one RNA molecule, i.e the antisense and sense sequences are present on the same RNA molecule, or may be different RNA molecules, i.e the antisense and sense sequences are present on different RNA molecules.

[0070] As used herein, a “double-stranded RNA” or “dsRNA” is an RNA molecule that is partially or completely double stranded. The dsRNA may be formed by an RNA molecule in antisense direction and an RNA molecule in sense direction. Double-stranded RNA may be formed by a single nucleic acid strand which comprises the sense and antisense sequences. In this case, the RNA molecule in sense direction and the RNA molecule in antisense are on the same RNA molecule. The resulting dsRNA has a hairpin or stem-loop structure, whereby the stem is formed by the sense and anti-sense sequences. The loop may be formed by a sequence which has no substantial complementarity within the strand and lies between the sense and antisense sequences. Such a loop sequence can be an intron sequence of a gene, such as the intron of the RGA2 gene of wheat (Loutre et al., 2009, Plant Journal 60, 1043-1054) or the second intron of the Cut2 gene of M. oryzae.

[0071] Alternatively, the dsRNA may be formed by two different RNA strands, whereby the antisense sequence and the sense sequence are on different strands. In this case, the RNA molecule in antisense direction is different from the RNA molecule in sense direction.

[0072] The term “dsRNA” comprises dsRNA which is capable of activating the RNAi pathway in a plant cell. The term “dsRNA” also comprises small or short interfering RNA (siRNA) and micro-RNA (miRNA). The two latter dsRNAs are either expressed in a transgenic plant of the present invention from the DNA capable of expressing an inhibitory nucleic acid molecule or are produced by the RNAi machinery in the plant cell starting from a longer dsRNA expressed from the DNA. The term “dsRNA” also comprises circular interfering RNA (ciRNA), short hairpin RNA (shRNA) and the like. The term “dsRNA” also includes dsRNA, such as hpRNA, siRNA, miRNA or longer dsRNA, comprising antisense and sense sequences, which is not produced within a transgenic plant, but is produced by genetic engineering or synthesizing methods in the laboratory and which is for external application on a plant and/or fungus.

[0073] As used herein, “RNAi” or “RNA interference” refers to the process of sequence-specific gene silencing, mediated by double-stranded RNA (dsRNA). In order to function, one strand of the dsRNA comprises an antisense sequence which is substantially complementary to (the) KRE5 and/or KRE6 mRNA(s) or (a) part(s) thereof which is (are) transcribed in the fungus. The other strand comprises a sense sequence which is substantially complementary to the antisense sequence. The dsRNA is capable of activating the RNAi pathway in a plant cell resulting in the formation of a single stranded RNA comprising the antisense strand which binds to (the) KRE5 and/or KRE6 mRNA(s) in the fungus and results in the degradation of the mRNA.

[0074] According to the present invention, the sizes of the sense or antisense sequence or the sizes of the RNA molecule in sense direction or the RNA molecule in antisense direction may be the same. Alternatively, the sizes may differ.

[0075] The DNA capable of expressing an inhibitory nucleic acid molecule results, in one embodiment of the present invention, upon expression in the plant cell in an mRNA molecule which may function as an aRNA and inhibit KRE5 and/or KRE6 mRNA(s) in the fungus. Such DNA molecule comprises on the sense strand an antisense sequence.

[0076] In another embodiment, the DNA which is capable of expressing an inhibitory nucleic acid molecule results upon expression in the plant cell in an mRNA molecule or in mRNA molecules which may form a dsRNA which may activate the RNAi machinery. Within this embodiment, the DNA encodes an RNA molecule in sense direction and an RNA molecule in antisense direction. The sense sequence and the antisense sequence may be present on one DNA strand. This may result in an mRNA molecule which comprises the sense sequence and antisense sequence on the same mRNA molecule. Due to the reverse substantial complementarity of the sense sequence and antisense sequence, a hairpin dsRNA will form. Alternatively, if e.g. the sense and antisense sequences being present on the same DNA strand are under the control of different promoters or of one bidirectional promoter, different mRNA molecules are transcribed one harboring the sense sequence and the other harboring the antisense sequence. Different mRNA molecules, one harboring the sense sequence and the other harboring the antisense sequence, may also form if the sense sequence and the antisense sequence are present on different strands of the DNA. Due to the invers substantial complementarity of the sense and antisense sequences, the mRNAs form a dsRNA. The dsRNA may be recognized as foreign by the plant cell and may activate the RNAi machinery. The dsRNA transcribed from the DNA may be an siRNA or miRNA molecule or may be processed to an siRNA or miRNA molecule. After infection of the plant with a fungus, an exchange of the RNA generated in the plant may occur between the plant and the fungus. The RNA incorporated in the fungus may lead to a sequence-specific gene silencing of the KRE5 and/or KRE6 gene(s). It is known that the siRNA effect can be continued in plants if the RNA dependent RNA polymerase synthesizes new siRNAs from the degraded mRNA fragments. These secondary or transitive RNAis can enhance the silencing.

[0077] As used herein, the term “DNA”, “DNA molecule” or DNA polynucleotide” etc. refers to double-stranded DNA, unless otherwise specified.

[0078] As used herein, “substantially complementary” refers to polynucleotide strands that are capable of base pairing according to the standard Watson-Crick complementarity rules. It is understood that two polynucleotides hybridize to each other even if they are not completely complementary to each other. Consequently, the term “substantially complementary” means that two polynucleotide sequences are complementary over at least 80% of their nucleotides, preferably over at least 85%, 90%, 95%, 96%, 97%, 98%, 99%. Most preferably, the two polynucleotide sequences are complementary over 100% of their nucleotides. Alternatively, “substantially complementary” means that two polynucleotide sequences can hybridize under high stringency conditions. It is understood that an antisense sequence which is substantially complementary to (a) fungal KRE5 and/or KRE6 gene(s) or transcript(s) has a low degree of complementarity to functionally identical or similar genes in plants, preferably below 60%, and does not hybridize or only to a low degree to endogenous plant genes or transcripts, so that the transcription and/or translation of plant genes is not reduced or reduced to at most 10%, as compared to a non-transgenic plant of identical phenotype.

[0079] As used herein, the term “hybridize(s)(ing)” refers to the formation of a hybrid between two nucleic acid molecules via base-pairing of complementary nucleotides. The term “hybridize(s)(ing) under stringent conditions” means hybridization under specific conditions. An example of such conditions includes conditions under which a substantially complementary strand, namely a strand composed of a nucleotide sequence having at least 80% complementarity, hybridizes to a given strand, while a less complementary strand does not hybridize. Alternatively, such conditions refer to specific hybridizing conditions of sodium salt concentration, temperature and washing conditions. As an example, highly stringent conditions comprise incubation at 42° C., 50% formamide, 5×SSC (150 mM NaCl, 15 mM trisodium citrate), 50 mM sodium phosphate, 5×Denhardt's solution, 10×dextran sulphate, 20 mg/ml sheared salmon sperm DNA and washing in 0.2×SSC at about 65° C. (SSC stands for 0.15 M sodium chloride and 0.015 M trisodium citrate buffer). Alternatively, highly stringent conditions may mean hybridization at 68° C. in 0.25 M sodium phosphate, pH 7.2, 7% SDDS, 1 mM EDTA and 1% BSA for 16 hours and washing twice with 2×SSC and 0.1% SDDs at 68° C. Further alternatively, highly stringent hybridisation conditions are, for example: Hybridizing in 4×SSC at 65° C. and then multiple washing in 0.1×SSC at 65° C. for a total of approximately 1 hour, or hybridizing at 68° C. in 0.25 M sodium phosphate, pH 7.2, 7% SDS, 1 mM EDTA and 1% BSA for 16 hours and subsequent washing twice with 2×SSC and 0.1% SDS at 68° C.

[0080] For introducing the DNA molecule capable of expressing an inhibitory nucleic acid molecule into a plant or a part thereof, the DNA molecule or the expression cassette harboring the DNA may be inserted into a vector. Vectors which harbor a DNA polynucleotide for effecting inhibition of gene expression in a plant cell are known to those in the art and are also useful for the purposes of the present invention of inhibiting the expression of (a) KRE5 and/or KRE6 gene(s) in a fungus. In addition to the DNA molecule, the vector may comprise heterologous regulatory element(s) in the 5′ and optionally in the 3′ positions which are able to function in a plant. The vector may comprise a promoter regulatory sequence that is functional in plant cells, operably linked to the DNA molecule, and optionally a terminator regulatory sequence. Such a vector may be a hairpin vector or a double promoter vector, as known in the art. An exemplary double promoter vector is disclosed in FIG. 20. Using this type of vector, the inserted DNA molecule is transcribed bidirectionally. An inverted double promoter allows the expression of one DNA sequence in the 3′ direction and of a second DNA sequence in the 5′ direction, whereby the resulting RNAs are substantially complementary to each other and generate dsRNA. Alternatively, two promoters or a bidirectional promoter, e.g. the mannopine synthase promoter (Guevara-Garcia et al., 1993, Plant Journal (3):495-505), may be employed such that one promoter regulates the transcription of a DNA sequence comprising an antisense sequence and the second promoter regulates the transcription of a DNA sequence comprising an antisense sequence, which, however, is present on the DNA not in complementary location to the sense sequence. Suitable binary vectors for the transformation of plants are the pBINPLUS vector (van Engelen et al., 1995, Transgenic Research 4, 288-290), the pGPTV vector (Becker et al., 1992, Plant Mol. Biol., 29, 1195-1197) , the p6U and p7U vector (DNA Cloning Service e. K., Hamburg, Germany; www.dna-cloning.com; U.S. Pat. No. 7,834,243).

[0081] According to the invention, the term “promoter regulatory sequence” or “promoter” is intended to mean any promoter of a gene that can be expressed in a plant. Such promoter may be a promoter which is naturally expressed in a plant or is of bacterial or viral origin. Preferably, the promoter is a tissue specific promoter and/or a pathogen inducible promoter. Examples of promoters of plant origin are the histone promoter (EP 0 507 698) or the rice actin promoter (U.S. Pat. No. 5,641,876). Examples of promoters of a plant virus gene are the cauliflower mosaic virus (CaMV 19S or 35S), the cassava vein mosaic virus (CsVMV: WO97/48819) or the circovirus promoter (AU 689 311). Examples of tissue-specific promoters are the napin (EP 255 378), phaseolin, glutenin, helianthinin (WO 9217580), albumin (WO 9845460) and oleosin (WO 9845461) promoter. Examples of inducible promoters are the promoters of phenylalanine ammonia lyase (PAL), of HMG-CoA reductase (HMG), of chitinases, of glucanases, of proteinase inhibitors (PI), of genes of the PR1 family, of nopaline synthase (nos) or of the vspB gene (U.S. Pat. No. 5,670,349), the HMG2 promoter (U.S. Pat. No. 5,670,349), the apple beta-galactosidase (ABG1) promoter or the apple amino cyclopropane carboxylate synthase (ACC synthase) promoter (WO 98/45445), or chimeric pathogen inducible promoters (WO 00/29592; WO 2007/147395; WO 2013/091612).

[0082] According to the invention, the term “terminator regulatory sequence” is intended to mean any such sequence that is functional in a plant, also comprising polyadenylation sequences. It may be of bacterial origin such as the nos or ocs terminator of Agrobacterium tumefaciens, of viral origin such as the CaMV 35S terminator, or of plant origin such as a histone terminator as described in EP 0 633 317.

[0083] The selection step for identifying a transformed plant or a part thereof comprising the DNA molecule or a processed construct can be carried out via a selectable gene present in the vector, as referred to above. The selectable gene may comprise an operably linked promoter regulatory sequence and terminator regulatory sequence that are functional in plant cells.

[0084] Among the selectable markers that can be used in the present invention, reference is made to genes for resistance to antibiotics, such as the hygromycin phosphotransferase gene, the neomycin phosphotransferase II gene inducing resistance to kanamycin, or the aminoglycoside 3″-adenyltransferase gene, genes for tolerance to herbicides such as the bar gene (White et al., Nucl. Acids Res., 1990, 18: 1062) for tolerance to bialaphos, the EPSPS gene (U.S. Pat. No. 5,188,642) for tolerance to glyphosate or else the HPPD gene (WO 96/38567) for tolerance to isoxazoles, genes encoding identifiable enzymes, such as the GUS enzyme, GFP protein or genes encoding pigments or enzymes regulating pigment production in the transformed cells. Such selectable marker genes are in particular described in patent applications WO 91/02071, WO 95/06128, WO 96/38567, and WO 97/04103.

[0085] Marker gene free transformation is another alternative to transfer the expression cassette of interest into the plant.

[0086] For introducing the DNA molecule into a plant or a part thereof, numerous methods are known in the art. A preferred method applied in the present invention is transformation of the DNA molecule, expression cassette or vector harboring the DNA molecule by the use of bacteria of the Agrobacterium genus, preferably by infection of the cells or tissues of plants with A. tumefaciens (Knopf, 1979, Subcell. Biochem. 6: 143-173; Shaw et al., 1983, Gene 23(3): 315-330) or A. rhizogenes (Bevan and Chilton, 1982, Annu. Rev. Genet. 16: 357-384; Tepfer and Casse-Delbart, 1987, Microbiol. Sci. 4(1): 24-28). For example, the transformation of plant cells or tissues with Agrobacterium tumefaciens is carried out according to the protocol described by Hiei et al. (1994, Plant J. 6(2): 271-282). Another preferred method is the biolistic transformation method, wherein cells or tissues are bombarded with particles onto which the vectors of the invention are adsorbed (Bruce et al., 1989, Proc. Natl. Acad. Sci. USA 86(24): 9692-9696; Klein et al., 1992, Biotechnology 10(3): 286-291; U.S. Pat. No. 4,945,050). A further method is the widely used protoplast transformation. Therefor, plant cells are separated by pectinases and subsequently, the cell wall is degraded to generate protoplasts. For transformation, polyethylene glycol is added or electroporation is applied. Other methods are bringing the plant cells or tissues into contact with polyethylene glycol (PEG) and the vectors of the invention (Chang and Cohen, 1979, Mol. Gen. Genet. 168(1): 111-115; Mercenier and Chassy, 1988, Biochimie 70(4): 503-517). Electroporation is another method, which consists in subjecting the cells or tissues to be transformed and the vectors of the invention to an electric field (Andreason and Evans, 1988, Biotechniques 6(7): 650-660; Shigekawa and Dower, 1989, Aust. J. Biotechnol. 3(1): 56-62). Another method consists in directly injecting the vectors into the cells or the tissues by microinjection (Gordon and Ruddle, 1985, Gene 33(2): 121-136). Those skilled in the art will choose the appropriate method according to the nature of the plant to be transformed and the fungus against which the plant is to be rendered resistant.

[0087] Cells or tissues of plants, e.g., root cells grown in culture, can be transformed with the desired gene and grown into mature plants. When transformation is effective, the transgene will be incorporated into the pollen and eggs and passed on to the next generation.

[0088] In one embodiment, the DNA molecule or expression cassette is stably integrated into the genome of the transgenic plant, preferably into a chromosome of the plant. Integration can, however, also occur into an extrachromosomal element. By stable integration into the genome of a plant, the DNA sequences can be passed to subsequent generations of the transgenic plant. Alternatively, the DNA molecule or expression cassette is present within the plant cell on the vector used to introduce the DNA molecule and is not stably integrated into the genome of the plant. Therefore, the DNA sequences may not be passed to subsequent generations of the plant.

[0089] According to the invention, all plants and all parts of a plant can be treated according to the methods of the present invention. By plants is meant all plants and plant populations such as desirable and undesirable wild plants, cultivars and plant varieties (whether or not protectable by plant variety or plant breeder's rights). Cultivars and plant varieties can be plants obtained by conventional propagation and breeding methods which can be assisted or supplemented by one or more biotechnological methods such as by use of double haploids, protoplast fusion, random or directed mutagenesis, molecular or genetic markers or by bioengineering or genetic engineering methods.

[0090] The term “part of a plant” refers to any parts or organs of a plant such shoot vegetative organs/structures, e.g., leaves, stems or tubers; roots, flowers or floral organs/structures, e.g. bracts, sepals, petals, stamens, carpels, anthers or ovules; seed, including embryo, endosperm or seed coat; fruit or the mature ovary; plant tissue, e.g. vascular tissue or ground tissue; or cells, e.g. guard cells, egg cells or trichomes; or progeny of the same. The term “cell” refers to a cell or cell accumulation within the plant as well as to an isolated cell or isolated cell accumulation. A cell may have a cell wall or may be a protoplast. In particular, the present invention relates to a seed which comprises the DNA, expression cassette or vector as comprised by the present invention. Preferably, the seeds of a transgenic plant retain the DNA, expression cassette or vector as comprised by the invention, so that the new plants generated from a seed continues to comprise the DNA, expression cassette or vector,

[0091] Plants that can be protected by the method according to the invention comprise all plants, preferably plants of economic interest, more preferably the plant according to the present invention is selected from the group consisting of barley (Hordeum vulgare), sorghum (Sorghum bicolor), rye (Secale cereale), Triticale, sugar cane (Saccharum officinarium), maize (Zea mays), foxtail millet (Setaria italic), rice (Oryza sativa), Oryza minuta, Oryza australiensis, Oryza alta, wheat (Triticum aestivum), Triticum durum, Hordeum bulbosum, purple false brome (Brachypodium distachyon), sea barley (Hordeum marinum), goat grass (Aegilops tauschii), apple (Malus domestica), strawberry, sugar beet (Beta vulgaris), sunflower (Helianthus annuus), Australian carrot (Daucus glochidiatus), American wild carrot (Daucus pusillus), Daucus muricatus, carrot (Daucus carota), eucalyptus (Eucalyptus grandis), Erythranthe guttata, Genlisea aurea, woodland tobacco (Nicotiana sylvestris), tobacco (Nicotiana tabacum), Nicotiana tomentosiformis, tomato (Solanum lycopersicum), potato (Solanum tuberosum), coffee (Coffea canephora), grape vine (Vitis vinifera), cucumber (Cucumis sativus), mulberry (Morus notabilis), thale cress (Arabidopsis thaliana), Arabidopsis lyrata, sand rock-cress (Arabidopsis arenosa), Crucihimalaya himalaica, Crucihimalaya wallichii, wavy bittercress (Cardamine flexuosa), peppergrass (Lepidium virginicum), sheperd's-purse (Capsella bursa-pastoris), Olmarabidopsis pumila, hairy rockcress (Arabis hirsuta), rape (Brassica napus), broccoli (Brassica oleracea), Brassica rapa, Brassica juncacea, black mustard (Brassica nigra), radish (Raphanus sativus), Eruca vesicaria sativa, orange (Citrus sinensis), Jatropha curcas, cotton (Gossipium sp.), soybean (Glycine max), and black cottonwood (Populus trichocarpa). Particularly preferred, the plant is selected from the group consisting of barley (Hordeum vulgare), sorghum (Sorghum bicolor), rye (Secale cereale), Triticale, sugar cane (Saccharum officinarium), maize (Zea mays), rice (Oryza sativa), wheat (Triticum aestivum), Triticum durum, Avena sativa, Hordeum bulbosum, sugar beet (Beta vulgaris), sunflower (Helianthus annuus), carrot (Daucus carota), tobacco (Nicotiana tabacum), tomato (Solanum lycopersicum), potato (Solanum tuberosum), coffee (Coffea canephora), grape vine (Vitis vinifera), cucumber (Cucumis sativus), thale cress (Arabidopsis thaliana), rape (Brassica napus), broccoli (Brassica oleracea), Brassica rapa, Brassica juncacea, black mustard (Brassica nigra), radish (Raphanus sativus), cotton (Gossipium sp.) and soy-bean (Glycine max).

[0092] The invention concerns a method of producing a transgenic plant or a part thereof, comprising the steps of introducing into at least a cell of the plant the DNA or the expression cassette or the vector as comprised by the invention, and regenerating the transgenic plant from the at least one cell.

[0093] As used herein “regenerating” means a process of growing an entire plant from a single cell, a group of cells, a part of the plant or a tissue of the plant. The skilled person knows methods of introducing DNA into at least a cell of the plant and growing a plant therefrom. “At least a cell” means a single cell, a group of cells, a part of the plant or a tissue of the plant.

[0094] Furthermore, the invention concerns a method of conferring fungal resistance to a plant or a part thereof comprising the steps of introducing into the plant or the part thereof the DNA or the expression cassette or the vector as comprised by the invention, and causing expression of the DNA or the expression cassette.

[0095] “As used herein, the term “causing expression” means that under the conditions, under which the plant is kept and/or cultivated, transcription of the DNA having been introduced into the plant is induced. For example, if the promoter is an inducible promoter, the activity of such promoter can be induced by the presence or absence of specific biotic or abiotic factors, according to the choice of the user of the present invention. If the promoter is a constitutive promoter, expression continuously occurs.

[0096] Furthermore, the invention concerns a method of inhibiting the expression of the KRE5 and/or KRE6 gene(s) in a fungus, comprising applying the DNA or the expression cassette or the vector as comprised by the invention to the fungus or to a plant or a part thereof.

[0097] As used herein “applying . . . to the fungus or to a plant or a part thereof” or a similar term means that the DNA, expression cassette or vector as comprised by the invention are administered to the fungus, plant or part thereof so that the fungus, plant or part thereof incorporate and express the DNA. The application on the plant may be in the laboratory using any methods of introducing the DNA, expression cassette or vector, as referred to above, into the plant or the part thereof. The application on the plant may also be in the field in order to render the plant which may be infected by a phyto-pathogenic fungus resistant to the fungus. The application may also be directly on the fungus in order to cause cessation of infection, growth, development, reproduction and/or pathogenicity and eventually death of the fungus. “Directly” means that the DNA, expression cassette or vector is applied on the fungus, so that the DNA, expression cassette or vector is introduced into the fungus without plant involvement. The fungus may have already infected the plant or may still be present outside the plant such as in the soil. The application in the field may occur by any method known in the art of applying a fungicide, such as spraying or splashing.

[0098] Furthermore, the invention concerns the use of the DNA or the expression cassette or the vector as comprised by the invention for inactivating a fungus, while contacting a plant or a part thereof; for protecting a plant against an infection by a fungus; or for inhibiting the expression of the KRE5 and/or KRE6 gene(s) in a fungus.

[0099] As used herein, “inactivating a fungus” means causing cessation of infection, growth, development, reproduction and/or pathogenicity and eventually death of the fungus. Inactivation occurs by RNA molecules directed against the KRE5 and/or KRE6 gene(s) or mRNA(s) of the fungus produced by the transgenic plants. Alternatively, inactivation occurs by applying the DNA, expression cassette or vector as comprised by the present invention onto the fungus outside the plant, such in the field. Inactivation of the fungus is obtained by reduction of the expression of the KRE5 and/or KRE6 gene(s) or mRNA(s) of the fungus, resulting in the reduction of the damages of the plant.

[0100] As used herein, “while contacting a plant” means that the fungus is in touch with the plant. Thus, the fungus is forming or has already formed structures to invade into cell of the plant. This means that differentiated structures of the fungus such as an appresorium is forming or has already formed and is penetrating or has already penetrated into a cell of the plant.

[0101] As used herein, “protecting a plant” means conferring resistance to the fungus on the plant. A resistant plant is not infested and/or damaged by a fungus or is infested and/or damaged by a fungus to a lower extent as compared to a plant of the same phenotype which is not treated according to the present invention. By introducing a DNA capable of expressing an inhibitory nucleic acid into a plant or a part thereof, resistance to a fungus harboring the KRE5 and/or KRE6 gene(s), against which the inhibitory molecule is directed, is obtained, so that the plant is protected from the fungus. To determine the resistance, the transgenic plant may be compared with a control plant which has the identical phenotype, however, does not contain the transgene. Resistance can be determined using an optical score wherein scores from non-resistant, if the symptoms of the transgenic plant correspond to those of the non-transgenic plant, to highly resistant, if no symptoms of fungus infection are seen, may be awarded. Alternatively, resistance can be determined by determining the KRE5 and/or KRE6 transcript amount(s) in the fungus during infection of a transgenic plant, as compared to the transcript amounts of the fungus of identical phenotype infected on a non-transgenic plant of identical phenotype, or in the fungus of same phenotype which does not infect a plant. The present inventors have found that, dependent on the amount of transcript reduction, sporulation of the fungus is reduced, the adhesion and formation of functional infection structures is prevented and the vegetative growth of the hyphae is strongly delayed. Reduction of the KRE5 and KRE6 transcript amounts by 47% and 49%, respectively, was sufficient to have a visibly negative effect on necrotrophic hyphae. Thus, transcript reduction of at least 40%, 50%, 60%, 70%, 80%, 90%, 95% or of 100% for the KRE5 transcript and/or transcript reduction of at least 40%, 50%, 60%, 70%, 80%, 90%, 95% or of 100% for the KRE6 transcript allows scoring the transgenic plant as being resistant or as having resistance to a fungus. Preferably, the damages on the plant are reduced by at least 50%, 60%, 70%, 80%, 90% or by 100% in a resistant transgenic plant according to the present invention as compared to a non-transgenic plant of identical phenotype.

[0102] The invention also concerns a composition comprising the DNA molecule capable of expressing inhibitory nucleic acid molecules capable of inhibiting the expression of (a) KRE5 and/or KRE6 gene(s) in a fungus, a composition comprising an expression cassette comprising the DNA molecule, a composition comprising a vector comprising the DNA molecule or a composition comprising dsRNA capable of inhibiting the expression of (a) KRE5 and/or KRE6 gene(s) in a fungus. The composition may be for external application on a plant and/or a fungus.

[0103] Alternatively, the composition may contain dsRNA, wherein one strand of this RNA comprises an antisense sequence which is substantially complementary the KRE5 and/or KRE6 gene(s) or mRNA(s) and the other strand comprises a sense sequence which is substantially complementary to the antisense sequence. The dsRNA may be an hpRNA, miRNA or siRNA. The definitions of dsRNA, sense and antisense sequences are given above. When the composition is applied to a plant and/or to a fungus from the outside, such as in the field, the dsRNA may be incorporated into the plant and/or the fungus and may inhibit the expression of (a) KRE5 and/or KRE6 gene(s) or mRNA(s) in the fungus via gene silencing such as via the antisense mechanism or the RNAi mechanism.

[0104] Double-stranded RNA for the manufacture of the composition in accordance with the invention can be produced in vitro using methods known to the skilled person. Thus, the dsRNA may be synthesized by genetic engineering methods from a DNA or by synthesis methods.

[0105] The composition in accordance with the invention may be used as a fungicide for a plant or a part thereof which is already infected by a fungus or will be potentially infected. The composition may also be used against the fungus, which has already infected the plant or which has not infected the plant, for example when the fungus is still outside the plant, for example in the soil. In this regard, the composition is used to control the growth of the pathogenic fungus either by the treatment of a plant or by the application on the fungus. The skilled person knows fungicide compositions and knows which further ingredients such as carrier substrates, whereby the carrier substrate has, for example, an RNA-stabilizing effect, to include into the composition and what methods to use in order to prepare and apply the composition to a plant and/or fungus in the field. The composition in accordance with the invention may furthermore be used as a pre-treatment for seed.

[0106] The invention is further explained in the following figures as examples, which are included for illustration purposes and are not intended to limit the invention.

### FIGURES

[0107] FIG. 1A and B: The phylogenetic trees indicate close relatedness of KRE5 and KRE6 of C. graminicola with corresponding KRE genes of filamentous fungi and yeasts. Filamentous Ascomycota are framed and labelled with ,A′, yeasts is framed and labelled with ,B′, Basidiomycota is framed and labelled with ,C′.

[0108] FIG. 2: Relationship of KRE5 proteins of filamentous fungi. Filamentous Ascomycota are labelled with ,A′, yeasts labelled with ,B′, Basidiomycota labelled with ,C′. The secretion signal (small bars); UDP-glucose:glycoprotein glucosyltransferase domain (striped bars); and glycosyl-transferase family 8-like domain (black bars) of Kre5 are shown. ER retention signal is given in capital letters. Protein sizes are indicated in amino acids (aa).

[0109] FIG. 3: Structure and size of KRE6 proteins of filamentous fungi and yeasts. Filamentous Ascomycota are labelled with ,A′, yeasts labelled with ,B′, Basidiomycota labelled with ,C′. Transmembrane domains (small bars) and family 16-like glycohydrolase 16 domains (large bars) of Kre6 are shown. Protein sizes are indicated in amino acids (aa).

[0110] FIG. 4: Alignments of the KRE5 protein sequences of various fungi of the ascomycotes and basidiomycotes Consensus denotes the consensus sequence based on the KRE 5 proteins as indicated (Consensus sequence KRE5; SEQ ID NO: 372).

[0111] FIG. 5: Alignments of the KRE6 protein sequences of various fungi of (A) the ascomycotes and (B) basidiomycotes. Consensus denotes the consensus sequence based on the KRE 6 proteins as indicated ((A) Consensus sequence KRE6 ascomycotes; SEQ ID NO: 373; (B) Consensus sequence KRE6 basidiomycotes; SEQ ID NO: 374).

[0112] FIG. 6. Complementation of Saccharomyces Δkre5 and Δkre6 mutants by Colletotrichum graminicola KRE5 and KRE6 cDNAs.

[0113] (A) Growth of dilution series of yeast strains on different solidified substrata. WT, S. cerevisiae reference strain Y00000; Δkre5 and Δkre6, KRE5 and KRE6-deficient S. cerevisiae strains Y21633 and Y05574 TpAG300, Δkre5 and Δkre6 transformant harboring the empty binary vector pAG300; TKRE51-4, independent Δkre5 transformants expressing the KRE5 cDNA of C. graminicola; TKRE61-4, independent Δkre6 transformants expressing the KRE6 cDNA of C. graminicola. YPD, yeast extract peptone dextrose agar; YPDS, YPD agar supplemented with sorbitol; or YPDS Calcofluor and YPDS Killer toxin K1, YPDS containing Calcofluor White or Killer Toxin K1. Number of yeast cells inoculated were (left to right) 5×10⁴, 5×10³, 5×10², and 5×10. Cells were grown at 30° C. for two days and photographed.

[0114] (B) Gowth of yeast strains in liquid YPDS. Names of strains are as described in (A). Arrowhead in insert of micrograph showing Δkre6 indicates filament emerging from yeast cell. Bars are 5 μm.

[0115] FIG. 7. Generation and characterization of KRE5:mCherry and KRE6:mCherry replacement strains.
[0116] (A) Scheme of generation of KRES5:mCherry and KRE6:mCherry replacement strains by homologous recombination. PoliC, oliC promoter; Nat-1, nourseothricin acetyl transferase-1 gene. Bars indicate position of probes used in Southern blot experiments.
[0117] (B) Genomic Southern blot showing that the 4.1 kb WT band has been replaced by a 7.5 kbmCherry fusion band in two independent replacement strains.
[0118] (C) OMA plates colonized by the WT and two independent KRES5:mCherry and KRE6:mCherry replacement strains. Plates were photographed 14 DAI.
[0119] (D) Growth rates of WT and two independent KRE5:mCherry and KRE6:mCherry replacement strains.
[0120] (E) Number of conidia formed by the WT and two independent KRE5:mCherry and KRE6:mCherry replacement strains.
[0121] (F) Virulence assay with the WT and two independent KRES5:mCherry and KRE6:mCherry replacement strains on maize leaves. Similar symptom intensities indicate similar virulence.

[0122] FIG. 8. Localization of Kre5:mCherry, Kre6:mCherry, and Gls1:eGFP in vegetative hyphae and protoplasts released from hyphae after treatment with cell wall-degrading enzymes.

[0123] (A) Vegetative hypha viewed using differential interference microscopy (DIC) or fluorescence microscopy. Fluorescence shows localization of Kre5:mCherryand of Gls1:eGFP. The merged micrographs (merge) show distinct localization of Kre5 (arrows) and Gls1 (arrows), as indicated by occurrence of distinct vesicles with merged flourescence, and co-localization of Kre6 and Gls1 in macro-vesicles, as indicated by additional fluorescence. Bars are 10 μm.

[0124] (B) Protoplasts 6 H or 24 H after release from hyphae. Note distinct localization of Kre5 and Gls1 and co-localization of Kre6 and Gls1. Bars are 10 μm.

[0125] FIG. 9. Asexual sporulation defects in KRE5- and KRE6-RNAi strains.

[0126] (A) On oat meal agar (OMA) and on OMA supplemented with osmolytes such as KCL or sorbitol, all RNAi strains show strongly reduced spore numbers, as compared with the WT strain. Only those KRE5- and KRE6-RNAi strains showing more than 40% of the transcript concentration of the WT strain are able to form conidia.

[0127] (B-H) While the WT strain produces falcate conidia, KRE5- and KRE6-RNAi strains produce small and misshapen spores (C and F), form aggregates in conidia (D and G, arrows), or burst and release lipid droplets (E and H). Bars are 10 μm.

[0128] (I and K) Quantification of conidial size and fraction of conidia that burst spontaneously. Note that conidial length and rate of rupture correlates with KRE5 and KRE6 transcript abundance (see FIG. 6).

[0129] (L) Cell wall defects in KRE5- and KRE6-RNAi strains are evident, as oval conidia of these generate, when incubated in lysing enzymes, release protoplasts faster than the WT strain.

[0130] (M) Transcript abundance of GLS1, in contrast to CHSV, is clearly reduced in KRE5- and KRE6-RNAi strains, suggesting that GLS1, KRE5, and KRE6 are co-regulated. Bars in A and I-M are ±standard deviations.

[0131] FIG. 10. Infection structure-specific formation of Kre5:mCherry and Kre6:mCherry, and of the Gls1:eGFP fusion proteins. DIC, differential interference microscopy; Kre5:mCherry, Kre6:mCherry, and Gls1:eGFP show fluorescing protein in different infection structures. ap, appressorium; co, conidium; gt, germ tube; iv, infection vesicle; ph, primary hypha; sh, secondary hypha. Bars in A, B, and E are 10 μm.

[0132] (A) Co-expression of KRE5 and GLS1 in conidia, germ tubes, appressoria and secondary hyphae. No fluorescence is observed in infection vesicles formed at 24 HAI.

[0133] (B) Co-expression of KRE6 and GLS1 in conidia, germ tubes, appressoria and secondary hyphae. No fluorescence is visible in infection vesicles (24 HAI). Arrows indicate a fluorescing conidium on the cuticle.

[0134] (C and D) Relative fluorescence of infection structures. Bars are ±standard deviations.

[0135] (E) Staining of β-1,6-glucan of intact infection structures formed on the cuticle (left two micrographs, and of cross-sections of in planta differentiated biotrophic and necrotrophic hypae using the β-1,6-GBP:YFP probe. Note that β-1,6-glucan is exposed on surfaces of conidia, appressoria, and in walls of secondary hypae, but not in walls of infection vesicles and primary hyphae.

[0136] FIG. 11. Generation and characterization of a probe detecting β-1,6-glucosidic bonds.

[0137] (A) Structure of the yeast expression vector used to produce and secrete the β-1,6-glucan binding protein fused to YFP (β-1,6-GBP:YFP). PADH1, yeast alcohol dehydrogenase 1 promoter; His6, His6 tag; β-1,6-GBP, β-1,6-glucan binding protein of C. graminicola; YFP, Yellow Fluorescing Protein.

[0138] (B) Patterns of proteins secreted by the S. cerevisiae WT strainY0000 and by transformant Tβ-1,6-GBP:YFP harboring the expression vector shown in (A). The β-1,6-GBP:YFP protein sectered into the growth medium was purified by a single Ni-affinity purification step (purified).

[0139] (C) Specificity of the β-1,6-GBP:YFP protein as tested with different polymeric cell wall carbohydrates in a dot-blot experiment.

[0140] (D) Quantitative fluorescence of the β-1,6-GBP:YFP protein bound to the carbohydrates spotted onto the Nylon filter shown in (C).

[0141] FIG. 12. PCR analyses showing that all transformants tested integrated the KRE5 and KRE6 deletion constructs ectopically.

[0142] (A) Scheme of planned deletion experiments by homologous recombination. Nat-1, nourseothricin acetyl transferase 1 gene; G418, aminoglycoside 3′-phosphotransferase gene.

[0143] (B) C. graminicola WT strain showing the KRE5 and KRE6 bands only, and transformants showing both the bands indicative of the intact KRE5 and KRE6 genes as well as of the antibiotic resistance genes.

[0144] FIG. 13. Effect of reduction of KRE5 and KRE6 transcript abundance by RNAi on vegetative hyphae

[0145] (A and B) Relative KRE5 and KRE6 transcript abundance in the WT strain, ten KRE5- and six KRE6-RNAi strains. Bars are ±standard deviations.

[0146] (C and D) Growth rates and penetration competence of selected KRE5- and KRE6-RNAi strains. Bars are ±standard deviations.

[0147] (E-H) Hyphal integrity of the WT, KRE5- and KRE6-RNAi strains. While the WT strains develops intact hyphae (E), KRE5-RNAi strains show hyphal swellings and ruptured hyphae releasing lipid vesicles (F, arrow), formation of intrahyphal hyphae (F, left insert, asterisks), and strong pigmentation of swellings (F, right insert, arrowheads). KRE6-RNAi strains also show hyphal swellings (G), from which protoplast-like bodies are released (arrows).

[0148] Intrahyphal hyphae (G, left insert, asterisks), and strong pigmentation of swellings (G, right insert, arrowheads) also occur in KRE6-RNAi strains. (H) While WT hyphae did not rupture, bursting hyphae were often observed in RNAi strains. Bars in E, F, and G are 10 μm. Bars in H are ±standard deviations.

[0149] (I-N) Effect of expression of KRE5- and KRE6-RNAi constructs on KRE5-(I) and KRE6-mCherry fluorescence (K), exposure of β-1,6-glucan, as visualized by β-1,6-GBP:YFP staining (L), GLS1 transcript levels (M), and exposure of β-1,3-glucan, as visualized by Aniline Blue Fluorochrome staining (N). Bars are ±standard deviations.

[0150] FIG. 14. RNAi constructs used for down-regulation of KRE5 and KRE6 transcript abundance in C. graminicola.

[0151] (A) Structure of RNAi constructs. PtrpC and TtrpC, trpC promoter and terminator; PoliC, oliC promoter; Nat-1, nourseothricin acetyl transferase gene. Bars indicate position of probes used in genomic Southern blots (B).

[0152] (B) Genomic Southern blots of independent transformants showing the number of integrated KRE5- and KRE6-RNAi cassettes.

[0153] FIG. 15. Appressorium formation and function are severely compromised in KRE5- and KRE6-RNAi strains of C. graminicola.

[0154] (A) While the WT strain germinates and differentiates melanized appressoria (WT, arrows), appressoria (asterisks) of both RNAi strains rupture (KRE5- and KRE6-RNAi, short arrows) and release vesicles (KRE5- and KRE6-RNAi, long arrows). In KRE5-RNAi strains, germ tubes appear to be melanized (KRE5-RNAi, arrowheads), in KRE6-RNAi strains release of vesicles often occurred over the entire appressorial surface (KRE6-RNAi, arrowheads). Bars are 10 μm.

[0155] (B) Quantification of pre-penetration infection structures formed by the WT and the RNAi strains.

[0156] (C) In contrast to the WT strain, the vast majority of appressoria differentiated by KRE5- and

[0157] KRE6-RNAi strains explode spontaneously.

[0158] (D) On all substrata tested KRE5- and KRE6-RNAi strains show severely reduced adhesion. Bars in B-D are ±standard deviations.

[0159] FIG. 16. Appressorial cell wall elasticity is significantly increased in KRE5- and KRE6-RNAi strains, resulting in reduction of turgor pressure.

[0160] (A) Appressoria of KRE5- and KRE6-RNAi strains swell in H2O and shrink in hypertonic PEG6000 solutions (400 mg/mL). In contrast, the diameter of the WT appressoria are unaffected by the osmotic potential of the surrounding medium. Note the length of the constant double arrow. Bars are 10 μm.

[0161] (B) Appressorial size of the WT and RNAi strains. White columns indicate diameters of appressoria in H2O, black columns give diameters of appressoria in PEG6000 (400 mg/mL). Bars are standard deviations.

[0162] (C) Incipient cytorrhizis experiments indicate that the appressorial turgor pressure is dramatically reduced in both, KRE5- and KRE6-RNAi strains, as compared with the WT strain. Bars are ±standard deviations.

[0163] FIG. 17. KRE5 and KRE6 are required for pathogenicity of C. graminicola.

[0164] (A) Infection assays were performed with the WT and selected KRE5- and KRE6-RNAi strains on non-wounded and wounded leaf segments. Mock-inoculated leaf segments were also included. Leaves were photographed six DAI.

[0165] (B) Quantification of virulence of WT, KRE5- and KRE6-RNAi strains on non-wounded and wounded leaf segments by qPCR. Samples for DNA extraction were taken six DAI. Bars are ±standard deviations.

[0166] (C) The WT strain colonized wounded leaves and formed thin secondary hyphae (arrow) growing across the host cell. KRE5- and KRE6-RNAi strains preferentially grew in close contact with the host cell wall, with hyphae showing swellings (asterisks). Arrows indicate growth across the host cell wall. The arrowhead points to brown pigmented regions. Micrographs were taken six DAI. Bars are 20 μm.

[0167] FIG. 18. Construction of C. graminicola strains carrying an additional KRE5 or KRE6 copy controlled by the constitutive trpC promoter of A. nidulans, and characterization of overexpression strains.

[0168] (A) KRE5 and KRE6 over-expression constructs transformed into the C. graminicola WT strain. PtrpC and TtrpC, trpC promoter; PoliC, oliC promoter; Nat-1, nourseothricin acetyl transferase-1 gene; TtubB, tubB promoter. Bars indicate position of probes used in genomic Southern blots (B).

[0169] (B) Genomic Southern blot analyses of the WT strain and of independent transformants, each harboring a single copy of the KRE5- and KRE6-overexpression construct.

[0170] (C) KRE5 and KRE6 transcript abundance in the WT strain and in independent transformants, harboring a single copy of the KRE5- and KRE6-overexpression construct.

[0171] (D) Morphology of colonies and growth rates of WT and two independent KRE5- and KRE6-overexpression strains on OMA. Plates were photographed 5 DAI.

[0172] FIG. 19. Overexpression of KRE5 and KRE6 during the biotrophic phase induces defense responses and causes non-pathogenicity of C. graminicola.

[0173] (A) Infection assays were performed with the WT and selected PtrpC:KRE5 and PtrpC:KRE6 strains on non-wounded and wounded leaf segments. Mock-inoculated leaf segments were also included. Leaves were photographed six DAI.

[0174] (B) Quantification of virulence of WT, PtrpC:KRE5 and PtrpC:KRE6 strains on non-wounded (left column) and wounded leaf segments (right column) by qPCR. Samples for DNA extraction were taken six DAI. Bars are ±standard deviations.

[0175] (C) DIC-microscopy of infection sites on non-wounded and wounded leaves. On non-wounded leaves the WT strain formed appressoria and differentiated biotrophic infection vesicles and primary hyphae. In wounded leaves, thin, fast growing secondary hyphae developed (arrowheads). On non-wounded leaves, PtrpC:KRE5 and PtrpC:KRE6 strains formed appressoria, which invaded the host cell and formed infection vesicles. Invading hyphae were covered by dark pigmented vesicles (PtrpC:KRE5, non-wounded, arrows). The micrograph showing the infection vesicle of the PtrpC:KRE6 strain (PtrpC:KRE6, non-wounded, iv) shows delivery of numerous large vesicles (PtrpC:KRE6, non-wounded, arrows) to the infection site. While the WT strain formed secondary hyphae in wounded leaves (WT, wounded, arrow-heads) without a visible plant response. Hyphae of PtrpC:KRE5 and PtrpC:KRE6 strains formed hyphae (PtrpC:KRE5 and PtrpC:KRE6, wounded, arrowheads), but hyphae were densely covered by dark vesicles (PtrpC:KRE5 and PtrpC:KRE6, wounded, arrows). Bars are 20 μm. Micrographs were taken six DAI.

[0176] (D) Fluorescence microscopy under UV light and microscopical investigation of DAB-stained leaf segments, visualizing formation of H2O2 indicated that both PtrpC:KRE5 and PtrpC:KRE6 strains, but not the WT strain, elicited strong defense responses. All strains differentiated appressoria on the leaf surface (arrows), but only the appressoria of PtrpC:KRE5 and PtrpC:KRE6 strains were decorated by brightly fluorescing papillae (arrowheads). Occasionally whole cell fluorescence was observed (asterisk). DAB staining revealed massive H2O2 formation in leaves inoculated with PtrpC:KRE5 and PtrpC:KRE6 strains, as indicated by browning, but not in leaves invaded by the WT strain. Bars are 30 μm.

[0177] (E) Quantification of cells fluorescing in response to infection with the WT and selected PtrpC:KRE5 and PtrpC:KRE6strains. Bars are ±standard deviations.

[0178] (F) Transcriptional response of maize leaves to infection with the WT, PtrpC:KRE5 and PtrpC:KRE6 strains. Mock-inoculated leaves served as control. Bars are ±standard deviations.

[0179] FIG. 20. Example of a binary plant transformation vector for establishing KRE5_{RNAI} plants. A selected sequence of the KRE5 gene of C. colletotrichum is under the control of two conversely transcribing 35S promoters.

[0180] FIG. 21. Detection of transcriptional silencing activity against the fungal KRE5 gene of Colletotrichum graminicola in the transgenic corn lines M-T-001, M-T-003, M-T-005, M-T-006 and M-T-024. Leaves of the non-transgenic genotype A-188, a transgenic RNAi control and the 5 HIGS lines were transiently transformed with the reporter gene construct pABM_ubiluci_GLRG_05611.

[0181] FIG. 22. Map of the plant transformation vector p7U-ubi_RGA2intronII_HIGS_GLRG_05611 which was used to transform a hairpin construct with a sense and antisense fragment of the Kre5 gene of Colletotrichum graminicola into maize.

[0182] FIG. 23. Map of the cloning vector pGGubi_RGA2intronII which was used for the construction of the HIGS vector pGGubi_RGA2intronII_HIGS_GLRG_05611.

[0183] FIG. 24. Map of the HIGS vector pGGubi_RGA2intronII_HIGS_GLRG_05611 which was used for the construction of the plant transformation vector p7U-ubi_RGA2intronII_HIGS_GLRG_05611.

[0184] FIG. 25. Map of the reporter gene vector pABM_ubiluci_GLRG_05611 which was used for the determination of transcriptional silencing activity of transgenic plants.

[0185] FIG. 26. Map of the wheat transformation vector p6U-35S-MgKRE5-35. A 401 bp large fragment of the KRE5 gene of M. graminicola was inserted between the inverse transcribed 35S promoters of the construct. 35S=35S promoter, dsRNA MgUDP-G=sequence of the M. graminicola gene KRE5, hpt=hygromycin B resistance gene, Ubi-int=maize ubiquitin promoter, T35S=terminator of the 35S Cauliflower mosaic virus.

### EXAMPLES

[0186] Identification of KRE5 Proteins

[0187] KRE5 proteins of filamentous fungi and yeasts have conserved protein domains, as shown in FIG. 2, which are suitable for the identification of a Kre5 gene of a fungal pathogen of interest. The KRE5 proteins have a size of 1290-1700 amino acids and an N-terminal secretion signal, a UDP-glucose:glycoprotein glucosyltransferase domain, a glucosyl-transferase family 8-like domain and an ER signal at the C-terminus. The following shows the KRE5 ascomycetes and basidiomycetes consensus sequence 1 comprising all strongly conserved amino acids in the aligned sequences, as shown in FIG. 4. These amino acids can be found from position 1431 to position 1693. X means any naturally occurring amino acid, Z means a gap or any naturally occurring amino acid:

(SEQ ID NO: 233)
INXFXVASGXLYERMXXXMXXSVXXXXXXXVKFWFIXXFL-
SPSFKXFXPHXXAXYXFXYXXVTYXWPXWLRXQXEKQRXIWGYKILFLDX
LF-
PLXXXXVIFVDXDQXVRXDXXXLXXXXLXGXXYXXXPMXXXXXXXXG-
FRFWXXGYWXXXLXGXPYHISALYVVDLXXFRXXAAGDXLRXXYXXLSAD
PXSLXNLDQDLPNXMQXXXPIXXLXXXWLWXXXXXXXZZZZZAXTIDLCX
NPXTXEPKLXRAXRXX-
PEWXXYDXE

[0188] The following shows the KRE5 ascomycetes and basidiomycetes consensus sequence 2 comprising all moderately and strongly conserved amino acids in the aligned sequences, as shown in FIG. 4, i.e. besides the strongly conserved amino acids, as given above in consensus sequence 1, also less conserved amino acids at other positions. These amino acids can be found from position 1431 to position 1693. X means any naturally occurring amino acid, Z means a gap or any naturally occurring amino acid:

[0189] FIG. 24. Map of the HIGS vector pGGubi_RGA2intronII_HIGS_GLRG-05611 which was used for the construction of the plant transformation vector p7U-ubi_RGA2intronII_HIGS_GLRG_05611.

[0190] FIG. 25. Map of the reporter gene vector pABM_ubiluci_GLRG_05611 which was used for the determination of transcriptional silencing activity of transgenic plants.

[0191] FIG. 26. Top: Map of the wheat transformation vector p6U-35S-MgKRE5-35. A 401 bp large fragment of the KRE5 gene of M. graminicola was inserted between the inverse transcribed 35S promoters of the construct. 35S=35S promoter, dsRNA MgUDP-G=sequence of the M. graminicola gene KRE5, hpt=hygromycin B resistance gene, Ubi-int=maize ubiquitin promoter, T35S=terminator of the 35S Cauliflower mosaic virus. Below: Enhanced Septoria blotch resistance of the wheat HIGS_{KRE5} line WA-601-T-035. The area under disease progression curve (AUDPC) from the disease scores taken 21, 26, 31 and 35 days after inoculation is shown for the transformation genotype Taifun, the non-transgenic segregants of the HIGS lines, the HIGS_{KRE5} line WA-601-T-035 and the reference lines Aurum and Taifun.

### EXAMPLES

[0192] Identification of KRE5 Proteins

[0193] KRE5 proteins of filamentous fungi and yeasts have conserved protein domains, as shown in FIG. 2, which are suitable for the identification of a Kre5 gene of a fungal pathogen of interest. The KRE5 proteins have a size of 1290-1700 amino acids and an N-terminal secretion signal, a UDP-glucose:glycoprotein glucosyltransferase domain, a glucosyl-transferase family 8-like domain and an ER signal at the C-terminus. The following shows the KRE5 ascomycetes and basidiomycetes consensus sequence 1 comprising all strongly conserved amino acids in the aligned sequences, as shown in FIG. 4. These amino acids can be found from position 1431 to position 1693. X means any naturally occurring amino acid, Z means a gap or any naturally occurring amino acid:

(SEQ ID NO: 233)
INXFXVASGXLYERMXXXMXXSVXXXXXXXVKFWFIXXFL-
SPSFKXFXPHXXAXYXFXYXXVTYXWPXWLRXQXEKQRXIWGYKILFLDX
LF-
PLXXXXVIFVDXDQXVRXDXXXLXXXXLXGXXYXXXPMXXXXXXXXG-
FRFWXXGYWXXXLXGXPYHISALYVVDLXXFRXXAAGDXLRXXYXXLSAD
PXSLXNLDQDLPNXMQXXXPIXXLXXXWLWXXXXXXXZZZZZAXTIDLCX
NPXTXEPKLXRAXRXXPEWXXYDXE

[0194] The following shows the KRE5 ascomycetes and basidiomycetes consensus sequence 2 comprising all moderately and strongly conserved amino acids in the aligned sequences, as shown in FIG. 4, i.e. besides the strongly conserved amino acids, as given above in consensus sequence 1, also less conserved amino acids at other positions. These amino acids can be found from position 1431 to position 1693. X means any naturally occurring amino acid, Z means a gap or any naturally occurring amino acid:

(SEQ ID NO: 234)
INIFSVASGHLYERMLNIMMVSVMKHTKHTVKFWFIEQFLSPSFKDFIPH
MAAEYGFXYE-
MVTYKWPHWLRQQKEKQREIWGYKILFLDVLFPLSLDKVIFVDADQIVRT
DMXELVNHD-
LEGAPYGFTPMCDSRTEMEGFRFWKQGYWANYL-
RGXPYHISALYVVDLRRFRQLAAGDRLRQQYHALSADPNSLSNLDQDLPN
N-
MQFXLPIHSLPQEWLWCETWCSDESLZZAKTIDLCNNPQT-
KEPKLDRARRQVPEWTVYDDE

[0195] Identification of KRE6 Proteins

[0196] KRE6 proteins of filamentous fungi and yeasts have conserved protein domains, as shown in FIG. 3, which are suitable for the identification of a Kre6 gene of a fungal pathogen of interest. The KRE6 proteins have a size of 460-919 amino acids and have a conserved glycosyl hydrolases family 16 domain (Pfam domain PF00722.16).

[0197] KRE6 proteins of ascomycetes could be identified by the “KRE6 ascomycetes consensus sequence a

[0198] KRE6 Ascomycetes

[0199] The following shows the KRE6 ascomycetes consensus sequence al comprising all strongly conserved amino acids in the aligned sequences, as shown in FIG. 5. These amino acids can be found from position 397 to position 450. X means any naturally occurring amino acid:

(SEQ ID NO: 235)
GDWXXXXXXMXPXXXXYGXWPXSGEXDIXXXRGXXXXXXXXXXXXXXXXX
XHXG

[0200] The following shows the KRE6 ascomycetes consensus sequence a2 comprising all moderately and strongly conserved amino acids in the aligned sequences, as shown in FIG. 5, i.e. besides the strongly conserved amino acids, as given above in consensus sequence a1, also less conserved amino acids at other positions. These amino acids can be found from position 397 to position 450. X means any naturally occurring amino acid:

(SEQ ID NO: 236)
GDWLWPAIWMMPVDDTYGXWPXSGEIDIMESRGNNWTYXQGXGNNIVSSA
LHWG

[0201] The following shows the KRE6 ascomycetes consensus sequence b1 comprising all strongly conserved amino acids in the aligned sequences, as shown in FIG. 5. These amino acids can be found from position 514 to position 561. X means any naturally occurring amino acid; Z means a gap or any naturally occurring amino acid:

(SEQ ID NO: 237)
GXFXXXXXXXXXXXXXXXXXXXZZXXXPFDXXFXLXXXXXVGXXXXWF

[0202] The following shows the KRE6 ascomycetes consensus sequence b2 comprising all moderately and strongly conserved amino acids in the aligned sequences, as shown in FIG. 5, i.e. besides the strongly conserved amino acids, as given above in consensus sequence b1, also less conserved amino acids at other positions. These amino acids can be found from position 514 to position 561. X means any naturally occurring amino acid; Z means a gap or any naturally occurring amino acid:

(SEQ ID NO: 238)
GXFPXAXANGTRLXDXWSQTGRXZZNTPFDQEFYLILNVAVGGTNGWF

[0203] KRE6 Basidiomycetes

[0204] The following shows the KRE6 basidiomycetes consensus sequence al comprising all strongly conserved amino acids in the aligned sequences, as shown in FIG. 5. These amino acids can be found from position 201 to position 435. X means any naturally occurring amino acid. Z means a gap or any naturally occurring amino acid:

(SEQ ID NO: 239)
GQVPXXXXXXXVXXXXXXXXXXXXXXXDXXXYNLVFSDEFXTXGRTFWPG
DDPXWE-
AXDLHYWXTGXXEWXXPXAXXTXNGXLNXXXXXEXXHXLNXRSGMLQSWN
KFCFXG-
GYXEVSXXLPGXXXXXGFWPXXWXXGNLGRAGYXXTTXGXWPY-
SYXSCDXGTLXNQTNXXXTXPAAAXXAXGXXXZZZZZZLSXLXGQXX-
SACTCXGXXHPGPXVXXGRXSPEIDIXEXQXXX

[0205] The following shows the KRE6 basidiomycetes consensus sequence a2 comprising all moderately and strongly conserved amino acids in the aligned sequences, as shown in FIG. 5, i.e. besides the strongly conserved amino acids, as given above in consensus sequence a1, also less conserved amino acids at other positions. These amino acids can be found from position 201 to position 435. X means any naturally occurring amino acid. Z means a gap or any naturally occurring amino acid:

(SEQ ID NO: 240)
GQVPLIHNLAGVIDPTTPDSVMSRKGFDGTQYNLVFSDEFXTDGRTFWPG
DDPYWEAV-
DLHYWATGNLEWFDPDAITTNNGNLNITITKELIHDLNYRSGMLQSWNKF
CFT-
GGYIEVSISLPGSPRISGFWPGAWTMGNLGRAGYGATTDGTWPY-
SYNSCDLGTLXNQTNVAKTGPAAALRAPGGGSZZZZZZLSFLPGQKLSSC
TCPGG-
DHPGPNVKXGRGSPEIDIIEAQVTA

[0206] The following shows the KRE6 basidiomycetes consensus sequence b1 comprising all strongly conserved amino acids in the aligned sequences, as shown in FIG. 5. These amino acids can be found from position 443 to position 612. X means any naturally occurring amino acid. Z means a gap or any naturally occurring amino acid:

(SEQ ID NO: 241)
GXASQSXQXAP-
FDXXYXWXXXXZXXXXXXXXXXXNXYXGGXYQEAVSXXXXXXXTAXXXXG
ZZZZZZZZZZZZZZZZZZZZZZZZZXXXXXTWXXXXXXXXXNXXXXIXQR
XXXXEP-
MXXXXNLAXSXXFXXVXXXXXXXPAXMXVDYVRVYQXXGQEXZIXCXPXX
XPT

[0207] The following shows the KRE6 basidiomycetes consensus sequence b2 comprising all moderately and strongly conserved amino acids in the aligned sequences, as shown in FIG. 5, i.e. besides the strongly conserved amino acids, as given above in consensus sequence b1, also less conserved amino acids at other positions. These amino acids can be found from position 443 to position 612. X means any naturally occurring amino acid. Z means a gap or any naturally occurring amino acid:

(SEQ ID NO: 242)
GQASQSVQFAPFDDGYNWXEDGZAXVYNPRXSXINSYKG-
GIYQEAVSVVSTTDQTAYEATGGZZZZZGZZYZZZZZZZZZGSITWZLGD
TATWTMSSSA-
VGPNPNVQISQRVVSEEPMYIILNLAISEAFQTVDXAHLPTPARMLVDYV
RVYQKXGQEN-
ZIGCSPKNFPT

[0208] KRE5 and KRE6 of C. graminicola are Functional Homologs of the Corresponding K1 Killer Toxin Resistance Genes of Yeast

[0209] BLASTX searches performed with Kre5 and Kre6 proteins of the yeast S. cerevisiae, the filamentous ascomycetes Magnaporthe oryzae, Neurospora crassa, Colletortichun gloeosporioides, Fusarium solani and the dimorphic basidiomycete Ustilago maydis suggested that single copy KRE5 and KRE6 genes exist in the annotated genome of C. graminicola (http://www.broadinstitute.org/annotation/genome/colletotrichum_group/FeatureSearch.html; O'Connell et al., 2012, Nat. Genet. 44: 962-970). The phylogenetic tree calculated on the basis of the derived amino acid sequences shows that the Kre5 and Kre6 proteins of filamentous ascomycetes form clades, distinct from the Kre proteins of yeasts and basidiomcetes (FIG. 1). On the amino acid level, Kre5 and Kre6 of C. graminicola share 69% and 60% sequence identity with the corresponding proteins of M. oryzae, and 65% and 63% with those of Fusarium solani, respectively. However, the C. graminicola Kre5 and Kre6 proteins are only 23%, and 30% identical to the proteins of S. cerevisiae. Plants also synthesize putative Kre5-like glycosyltransferase proteins. The proteins of Arabidopsis (NP_177278.3) and maize (AFW73943) share only 32% and 54% identity with Kre5 of C. graminicola. Kre6 homologs do not occur in plants.

[0210] The size of the predicted fungal Kre5 proteins ranges from 1293 (Ashbya gossypii) to 1678 amino acids (Ustilago maydis), with Kre5 of C. graminicola containing 1492 amino acids. All Kre5 proteins contain an N-terminal secretion signal and two different conserved glycosyl-transferase domains. Importantly, all Kre5 proteins show a C-terminal ER retention signal. While Kre5 proteins of the Colletotrichum species shown here and of Neurospora crassa exhibit an IDEL retention signal, Kre5 proteins of the majority of filamentous ascomycetes have a KDEL-, and the majority of those of dimorphic fungi have a HDEL tetrapeptide (FIG. 2).

[0211] The size of the predicted fungal Kre6 proteins ranges from 349 (Kre6.3 of C. neoformans) to 919 amino acids (Kre6.4 of Ustilago maydis), with Kre6 of C. graminicola consisting of 477 amino acids. The vast majority of Kre6 proteins contains a single N-terminal transmembrane domain and a prominent central family 16 glycohydrolase core domain (FIG. 3). In contrast to Kre5 proteins, an apparent ER retention signal does not exist in Kre6 proteins.

[0212] The function of KRE5 and KRE6 of C. graminicola was confirmed by complementation of yeast KRE5 and KRE6 deletion strains Y21633 and Y05574. The S. cerevisiae Δkre5 and Δkre6 mutants are viable but exhibit severe growth defects on osmotically non-stabilized medium (FIG. 6). These growth defects were fully rescued by osmotically stabilizing the YPD medium with 1 M sorbitol (FIG. 6, YPDS). Both Δkre5 and Δkre6 strains were hypersensitive to the chitin synthesis inhibitor Calcofluor White and showed increased resistance to the viral killer toxin K1, which needs to bind to β-1,6-glucan in order to execute its toxic effect.

[0213] Approx. one million yeast transformants expressing the C. graminicola KRE5 and KRE6 cDNAs under control of the constitutive yeast alcohol dehydrogenase 1 promoter (PADH1) were generated, and four independent transformants each (TKRE51-4 and TKRE61-4) were randomly chosen and used in growth assays. All yeast transformants expressing C. graminicola KRE5 and KRE6 cDNA showed growth comparable to that of the WT strain, irrespective of osmotic support, and resistance to Calcofluor White. As expected, Δkre5 and Δkre6 strains expressing C. graminicola KRE5 and KRE6 cDNAs were susceptible to the killer toxin K1 (FIG. 6A). Cells of Δkre5 and Δkre6 strains were significantly larger than those of the WT strain, likely due to severe cell wall defects in the mutant strains (FIG. 6B). Interestingly, some of the Δkre6 cells formed irregularly shaped filaments (FIG. 6B, Δkre6, insert). Yeast transformants expressing C. graminicola KRE5 and KRE6 cDNA exhibited size and shape comparable to the WT, indicating that the KRE5 and KRE6 cDNAs were fully functional. The empty expression vector pAG300 (TpAG300) did not rescue the phenotype of Δkre5 and Δkre6 strains (FIGS. 6A and B).

[0214] Collectively, sequence similarities with functionally characterized proteins, predictions of programs such as SignalP Server v. 7.0 and TMHMM Server v. 2.0, as well as the yeast complementation experiments strongly suggest that Kre5 and Kre6 of C. graminicola represent functional secreted UDP-glucose-dependent glycosyltransferase- and membrane-integral glycohydrolase-like proteins, respectively.

[0215] Sequence data for KRE5 and KRE6 genes of various fungi are available from the NCBI (National Centre for Biotechnology Information; National Library of Medicine 38A, Bethesda, Md. 20894, USA) under the following accession numbers:

[0216] KRE5 Genes and Proteins

[0217] The following list indicates the organism and the accession numbers under which amino acid and nucleotide sequences of KRE5 are to be found. These amino acid and nucleotide sequences are disclosed, in the order of appearance, in the sequence listing under SEQ ID NOs: 1 to 76, whereby uneven numbers refer to the KRE5 protein and the following even numbers refer to the coding sequence encoding the preceding protein.

[0218] A. gossypii, Ashbya gossypii (NP_984460.1); B. bassiana, Beauveria bassiana (EJP60779.1); B. maydis, Bipolaris maydis (EN100093.1); B. sorokiniana, Bipolaris sorokiniana (EMD66340.1); B. fuckeliana, Botryotinia fuckeliana (synonym of B. cinerea, Botrytis cinerea) (XP_001552779.1); C. graminicola, Colletotrichum graminicola (EFQ30467.1); C. gloeosporioides, Colletotrichum gloeosporioides, (ELA26384.1); C. orbiculare, Colletotrichum orbiculare (ENH83729.1); C. albicans, Candida albicans (XP_720119.1); C. glabrata, Candida glabrata (XP_445924.1); C. orthopsilosis, Candida orthopsilosis (XP_003867612.1); C. parapsilosis, Candida parapsilosis (CCE40308.1); C. tropicalis, C. tropicalis, Candida tropicalis (XP_002548275.1); C. purpurea, Claviceps purpurea (CCE27564.1); C. militaris, Cordyceps militaris (EGX96522.1); C. neoformans, Cryptococcus neoformans (XP_568822.1); F. fujikuroi, Fusarium fujikuroi (CCT67477.1); F. graminearum, Fusarium graminearum (XP_388116.1); F. oxysporum, Fusarium oxysporum (EGU85390.1); F. solani, Fusarium solani (XP_003040714.1); G. graminis, Gaeumannomyces graminis (EJT75191.1); L. maculans, Leptosphaeria maculans (XP_003837705.1); M. oryzae, Magnaporthe oryzae (XP_003716409.1); M. acridum, Metarhizium acridum (EFY92405.1); M. anisopliae, Metarhizium anisopliae (EFY99515.1); N. crassa, Neurospora crassa (XP_959471.1); P. teres, Pyrenophora teres (XP_003302012.1); P. tritici-repentis, Pyrenophora tritici-repentis (XP_001932611.1); P. graminis, Puccinia graminis (XP_003335101.2); T. virens, Trichoderma virens (EHK19050.1); S. sclerotiorum, Sclerotinia sclerotiorum (XP_001587888.1); S. cerevisiae, Saccharomyces cerevisiae (EEU07540.1); U. maydis, Ustilago maydis, (XP_757659.1); U. hordei, Ustilago hordei (CCF53656.1); V. alfalfae, Verticillium alfalfae (XP_003001998.1); V. dahliae, Verticillium dahliae (EGY20293.1); Z. bailii, Zygosaccharomyces bailii (CDF90600.1); Z. rouxii, Zygosaccharomyces rouxii (XP_002496624.1).

[0219] The following list indicates the organisms comprising the KRE5 proteins and genes which are disclosed, in the order of appearance, under SEQ ID Nos: 77 to 88.

[0220] Alternaria solani, Cercospora beticola, Mycosphaerella graminicola, Puccinia striiformis, Puccinia triticina, and Verticillium dahliae.

[0221] Especially preferred, the inhibitory nucleic acid molecule capable of inhibiting the expression of (a) KRE5 and/or KRE6 gene(s) in a fungus inhibits the expression of the KRE5 gene of the following species: Alternaria solani, Ashbya gossypii, Bipolaris maydis, Bipolaris sorokiniana, Botryotinia fuckeliana, Cercospora beticola, Colletotrichum graminicola, Colletotrichum gloeosporioides, Colletotrichum orbiculare, Claviceps purpurea, Fusarium fujikuroi, Fusarium graminearum, Fusarium oxysporum; Fusarium solani, Gaeumannomyces graminis, Leptosphaeria maculans, Magnaporthe oryzae, Mycosphaerella graminicola, Pyrenophora teres, Pyrenophora tritici-repentis, Puccinia graminis, Puccinia striiformis, Puccinia triticina, Sclerotinia sclerotiorum, Ustilago maydis, Ustilago hordei, Verticillium alfalfa, and Verticillium dahliae (the accession numbers are, as indicated above).

[0222] KRE6 Genes and Proteins

[0223] The following list indicates the organism and the accession numbers under which amino acid and nucleotide sequences of KRE6 are to be found. These amino acid and nucleotide sequences are disclosed, in the order of appearance, in the sequence listing under SEQ ID NOs: 89 to 222, whereby uneven numbers refer to the KRE6 protein and the following even numbers refer to the coding sequence encoding the preceding protein.

[0224] B. bassiana, Beauveria bassiana (EJP65479.1); B. graminis, Blumeria graminis (CCU77212.1); B. fuckeliana, Botryotinia fuckeliana (synonym of B. cinerea, Botrytis cinerea) (XP_001549048.1); C. albicans, Candida albicans (KRE6) (EEQ44379.1); C. albicans, Candida albicans (KRE6) (EEQ44618.1); C. albicans, Candida albicans (SKN1) (P87024.1); C. glabrata, Candida glabrata (XP_446183.1); C. glabrata, Candida glabrata (XP_447683.1); C. tropicalis, Candida tropicalis (SKN1) (XP_002547983.1); C. tropicalis, Candida tropicalis (KRE6) (XP_002547982.1); C. globosum, Chaetomium globosum (EGY21198.1); C. gloeosporioides, Colletotrichum gloeosporioides (ELA25364.1); C. graminicola, Colletotrichum graminicola (EFQ32556.1); C. higginsianum, Colletotrichum higginsianum (CCF34135.1); C. orbiculare, Colletotrichum orbiculare (ENH85681.1); C. militaris, (EGX96292.1); C. neoformans, Cryptococcus neoformans (SKN1) (CNAG_00897.2); C. neoformans, Cryptococcus neoformans (KRE6) (CNAG_00914.2); C. neoformans, Cryptococcus neoformans (KRE61) (CNAG_06835.2); C. neoformans, Cryptococcus neoformans (KRE62) (CNAG_06832.2); C. neoformans, Cryptococcus neoformans (KRE63) (CNAG_06031.2); C. neoformans, Cryptococcus neoformans (KRE64) (CNAG_05815.2); C. purpurea, Claviceps purpurea (CCE32615.1); C. posadasii, Coccidioides posadasii (EFW17515.1); C. thermophilum, Chaetomium thermophilum (EGS22614.1); E. pusillum, Endocarpon pusillum (ERF71048.1); E. dermatitidis, Exophiala dermatitidis (EHY52267.1); F.graminearum, Fusarium graminearum (XP_388710.1); F. fujikuroi, Fusarium fujikuroi (CCT73009.1); F. solani, Fusarium solani (XP_003041595.1); F. oxysporum, Fusarium oxysporum (ENH65541.1); G. graminis, Gaeumannomyces graminis (EJT70769.1); L. thermotolerans, Lachancea thermotoleran (XP_002555132.1); M. oryzae, (XP_003721228.1); M. brunnea, Marssonina brunnea (EKD14562.1); M. thermophila, Myceliophthora thermophila (XP_003666443.1); M. acridum, Metarhizium acridum (EFY93704.1); M. anisopliae, Metarhizium anisopliae (EFY95465.1); M. phaseolina, Macrophomina phaseolina (EKG13666.1); N. crassa, (XP_958019.1); P. anserina, Podospora anserina (XP_003437515.1); P. brasiliensis (EEH42350.1); P. tritici-repentis, Pyrenophora tritici-repentis (KRE6) (XP_001935327.1); P. nodorum, Phaeosphaeria nodorum (XP_001797916.1); S. cerevisae, Saccharomyces cerevisiae (Kre6) (NP_015485.1); S. arboricola, Saccharomyces arboricola (Kre6) (EJS41292.1); S. cerevisae, Saccharomyces cerevisiae (SKN1) (EGA86662.1); S. arboricola, Saccharomyces arboricola (SKN1) (EJS43532.1); S. sclerotiorum, Sclerotinia sclerotiorum (XP_001593690.1); S. macrospora, (XP_003344223.1); S. japonicus, (XP_002173652.1); Z. rouxii, Zygosaccharomyces rouxii (XP_002496208.1); Z. rouxii, Zygosaccharomyces rouxii (XP_002496207.1); T. marneffei, Talaromyces marneffei (XP_002148725.1); T. stipitatus, Talaromyces stipitatus (XP_002485501.1); T. terrestris, Thielavia terrestris (XP_003651215.1); T. virens, Trichoderma virens (EHK18881.1); T. reesei, Trichoderma reesei (EGR46871.1); T. atroviride, Trichoderma atroviride (EHK45772.1); U. maydis, Ustilago maydis (XP_759188.1); U. maydis, Ustilago maydis (XP_761958.1); U. maydis, Ustilago maydis (XP_761956.1); U. maydis, Ustilago maydis (XP_761865.1); U. maydis, Ustilago maydis (XP_757004.1); U. maydis, P. fijiensis, Pseudocercospora fijiensis (EME88366.1); V. alfalfae, Verticillium alfalfae (XP_003008063.1); V. dahliae, Verticillium dahliae (EGY21198.1).

[0225] The following list indicates the organisms comprising the KRE6 proteins and genes which are disclosed, in the order of appearance, under SEQ ID Nos: 223 to 232.

[0226] Alternaria solani, Cercospora beticola, Magnaporthe oryzae, Puccinia graminis, and Puccinia triticiana.

[0227] The KRE6 amino acid and nucleotide sequences of D. maydis, Diplodia maydis are disclosed in the sequence listing under SEQ ID NOs: 375 and 376, respectively.

[0228] Especially preferred, the inhibitory nucleic acid molecule capable of inhibiting the expression of (a) KRE5 and/or KRE6 gene(s) in a fungus inhibits the expression of the KRE6 gene of the following species: Alternaria solani, Blumeria graminis, Botryotinia fuckeliana, Cercospora beticola, Claviceps purpurea, Colletotrichum graminicola, Colletotrichum higginsianum, Colletotrichum orbiculare, Fusarium fujikuroi, Fusarium solani, Fusarium oxysporum, Gaeumannomyces graminis, Magnaporthe oryzae, Puccinia graminis, Puccinia triticiana, Pyrenophora tritici-repentis, Phaeosphaeria nodorum, Sclerotinia sclerotiorum, Ustilago maydis, Verticillium alfalfae, and Verticillium dahlia dahliae (the accession numbers are, as indicated above; for Ustilago maydis, the accession number is XP_759188.1)

[0229] Expression of KRE5 and KRE6 and Cell Wall β-1,6-Glucan Contents are Drastically Down-Regulated in Biotrophic Hyphae

[0230] To study localization of Kre5 and Kre6 as well as expression of KRE5 and KRE6 in infection structure, C. graminicola strains were generated carrying single copies of KRE5:mCherry or KRE6:mCherry, replacing the KRE5 and KRE6 WT genes (FIGS. 7A and B).

[0231] Gene replacements were performed in a strain, in which the WT GLS1 allele had been replaced by a GLS1:eGFP fusion (Oliveira-Garcia E and Deising H B, 2013). The four independent and randomly chosen transformants of each strain did not differ in colony phenotype, vegetative growth rates, sporulation rates and virulence on maize (FIG. 7C-F).

[0232] Fluorescence microscopy of vegetative hyphae revealed that both the KRE5:mCherry GLS1:eGFP and the KRE6:mCherry GLS1:eGFP replacement strains showed an assembly of strongly fluorescing vesicles primarily in the hyphal tip region (FIG. 8A). Kre5:mCherry fluorescence did not co-localize with fluorescing macro-vesicles harboring Gls1:eGFP, as indicated by the presence of distinct vesicles in different colors in the merged fluorescence micrographs (FIG. 8A, merge; Kre5:mCherry; Gls1:eGFP). In contrast, Kre6:mCherry and Gls1:eGFP co-localized in macro-vesicles, as only superposed fluorescing vesicles were visible in the merged micrographs (FIG. 8A, merge).

[0233] To investigate localization of Kre5 and/or Kre6 after fusion of the vesicles with the plasma membrane, protoplasts were generated, using fungal cell wall lyzing enzymes from Trichoderma harzianum, and subsequently incubated for up to 24 h (FIG. 8B). Six hours after protoplasting, vesicles fluoresced brightly, and co-localization of Kre6:mCherry and Gls1:eGFP, but not of Kre5:mCherry and Gls1:eGFP, was clearly evident (FIG. 8B, 6 h; compare with FIG. 8A, merge). Interestingly, 24 hours after protoplasting, the vesicles had fused with the plasma membrane, again resulting in co-localization of Kre6:mCherry and Gls1:eGFP in the membrane (FIG. 8B, 24 h), suggesting that these 13-glucan-forming enzymes may directly cooperate in cell wall branched β-glucan synthesis at the plasma membrane. However, in accordance with the secretion signal and the lack of membrane-spanning domains in Kre5, the enzyme is likely secreted and escaped from the protoplasts (FIG. 8B, 24 h).

[0234] KRE genes are thought to be constitutively expressed during vegetative growth. This, however, may not be the case in infection hyphae, as Oliveira-Garcia E and Deising, H B, 2013, have recently shown that expression of the β-1,3-glucan synthase gene GLS1 is rigorously down-regulated in biotrophic infection structures of C. graminicola, and that avoidance of exposure of β-1,3-glucan is required to evade β-glucan-triggered defense responses in maize. Correspondingly, as both β-1,3- and β-1,6-linkages are likely present in structural β-glucans triggering defense responses, infection structure-specific regulation of KRE5 and KRE6 genes, like of GLS1, may be required to establish a compatible interaction between this pathogen and its host. So far, to our knowledge, expression of KRE genes and synthesis of β-1,6-glucan has not been analyzed during any fungal infection process on plants. Unfortunately, as infection structure differentiation of C. graminicola on maize leaves does not occur in a synchronized fashion, neither RT-qPCR-based quantification of KRE5 and KRE6 transcript abundance nor chemical quantification of β-1,6-glucan in individual infection hyphae are feasible. We therefore used the KRE5:mCherry and KRE6:mCherry replacement strains of C. graminicola to quantify KRE5 and KRE6 expression in individual infection structures of C. graminicola by measuring mCherry fluorescence, and to compare KRE gene expression with the expression of GLS1, measured as GLS1:eGFP fluorescence (Oliveira-Garcia and Deising, 2013) (FIG. 10). Virulence of KRE5:mCherry and KRE6:mCherry replacement strains did not differ from that of the WT strain (FIG. 7F). Strong Kre5:mCherry and Kre6:mCherry fluorescence was observed in non-germinated conidia and in appressoria. Importantly, biotrophic infection vesicles and primary hyphae showed only background Kre5:mCherry and Kre6:mCherry fluorescence (FIGS. 10A and B, 24 HAI, ph; FIGS. 10C and D, ap; note that the fluorescence signal marked with an arrow in FIG. 3B was emitted by the germ tube and the conidium on the cuticle, not by the biotrophic hypha). In marked contrast to biotrophic hyphae, necrotrophic secondary hyphae formed by KRE5:mCherry and KRE6:mCherry strains exhibited strong fluorescence (FIGS. 10A and B, 72 HAI, sh; FIGS. 10C and D, sh). Like Kre5:mCherry and Kre6:mCherry fluorescence, Gls1:eGFP fluorescence was strong in conidia, appressoria and necrotrophic hyphae, but almost undetectable in biotrophic hyphae (FIGS. 10A and B, Gls1:eGFP). Thus, spatial distribution and intensities of mCherry and eGFP fluorescence intensities in KRE5:mCherry GLS1:eGFP and the KRE6:mCherry GLS1:eGFP replacement strains strongly suggests co-regulation of β-1,3-synthesis and β-1,6-bond formation.

[0235] As molecular probes for infection structure-specific detection of β-1,6-glucan are not commercially available, we generated a chimeric protein consisting of 231 amino acids of the β-1,6-glucan binding domain of endo-β-1,6-glucanase of C. graminicola (GLRG_00130.1) and 238 amino acids of the yellow fluorescent protein (YFP) of Aequoria victoria, yielding β-1,6-GBD:YFP (FIG. 11A). Expression of this construct in S. cerevisiae was driven by the alcohol dehydrogenase 1 promoter (PADH1), and the addition of a secretion signal and a His6-tag allowed simple affinity purification from yeast culture filtrates (FIG. 11B). Dot blot analyses revealed that this probe strongly decorated the β-1,6-glucan homopolymer pustulan, and, to minor extent, the β-1,3-glucan laminarin. Laminarin is as a β-1,3-glucan containing some β-1,6-linkages, and these β-1,6-linkages may explain labeling of commercially available laminarin. Other polymers tested, i.e. cellulose, mannan, chitin and chitosan only showed background or no labeling (FIGS. 110 and D). Therefore the β-1,6-GBD:YFP-probe was considered suitable for investigating β-1,6-glucan bonds of the infection structures of C. graminicola. In full agreement with the KRE5 and KRE6 gene expression data, the β-1,6-GBD:YFP probe decorated infection structures formed on the maize leaf cuticle, i.e. conidia, germ tubes and appressoria (FIG. 10E). As the β-1,6-GBD:YFP-probe did not diffuse into infected plant tissue, visualization of β-1,6-glucan was only possible in cross sections of infected leaves. Intriguingly, labeling experiments with cross-sectioned biotrophic and necrotrophic hyphae showed that β-1,6-glucan bonds are prominent in secondary hyphae, but almost undetectable in biotrophic infection vesicles and primary hyphae (FIG. 10E).

[0236] In conclusion, fluorescence microscopy revealed that KRE5 and KRE6 expression, and β-1,6-glucan contents of cell walls, are prominent in conidia, appressoria and necrotrophic hyphae but are dramatically down-regulated in biotrophic infection structures of C. graminicola.

[0237] RNAi-Mediated Reduction of KRE5 and KRE6 Transcript Abundance Causes Severe Cell Wall Defects, Impaired Invasive Growth, and Hyper-Pigmentation of Vegetative Hyphae

[0238] While deletion of KRE5 and KRE6 was successful in the dimorphic fungus Cryptococcus neoformans, attempts to delete these genes in C. graminicola failed (FIG. 12). PCR screens performed with more than 200 single-spore isolates of transformants uniformly led to amplification of a 4.8 and 2.2 kb fragment indicative of the intact KRE5 and KRE6 genes, respectively (FIG. 12B), and of a 1.7 and 1.5 kb fragment, suggesting that the deletion cassettes carrying the Nourseothricin (Nat) or Geneticin resistance gene (G418) had integrated ectopically. As average rates of homologous integration in C. graminicola are usually above 30%, these results strongly suggest that deletion of KRE5 or KRE6 is lethal.

[0239] To circumvent the lethality of KRE5 and KRE6 deletion, a RNAi-based knock down strategy was adopted, comparable to the strategy used to down-regulate GLS1 transcript concentrations in C. graminicola (Kück and Hoff, 2010, Appl. Microbiol. Biotechnol. 86: 51-62) (FIG. 13 and FIG. 14). The RNAi vector consisted of the trpC promoter of Aspergillus nidulans, 928 bp and 923 bp sense and antisense fragments of the second exon of the KRE5 and KRE6 genes of C. graminicola, respectively, separated by 135 bp of the second intron of the Cut2 gene of M. oryzae, followed by the trpC terminator of A. nidulans. The Nourseothricin resistance gene from Streptomyces noursei (Malonek S, et al., 2004, J. Biol. Chem. 279: 25075-25084) was used as the selection marker (FIG. 14A).

[0240] XhoI-digested genomic DNA of the WT and RNAi strains was analyzed by Southern hybridization. Ten KRE5- and six KRE6-RNAi strains harboring single or two copies of the RNAi construct in their genome have been identified (FIGS. 14B and C). The RNAi strains showed gradually and significantly reduced KRE5 and KRE6 transcript abundance, as indicated by RT-qPCR analyses. As compared with the WT strain, KRE5-RNAi strains showed KRE5 transcript abundances between 53 and 10%, and KRE6 transcript abundances in KRE6-RNAi strains ranged between 51 and 19%, respectively (FIGS. 13A and B). All RNAi strains exhibited severely reduced growth rates (FIGS. 13C and D).

[0241] Furthermore, analysis of hyphal penetration competence was performed in race tubes containing different agar concentrations (Brush and Money, 1999, Fungal Genetics and Biology 28: 180-200). All RNAi strains had severe invasive growth defects, and the severity of the growth defect correlated with the KRE5 and KRE6 transcript abundance (FIGS. 13C and D, right penal). Intriguingly, light microscopy revealed that vegetative hyphae of both KRE5- and KRE6-RNAi strains exhibited severe hyphal swellings (FIGS. 13E-G), many of which contained intrahyphal hyphae reminiscent of mutants of several fungi deficient in class V chitin synthase (FIGS. 13F and G, insert, asterisks). Comparable to GLS1-RNAi strains (Oliveira-Garcia and Deising, 2013), hyphal swellings were strongly pigmented (FIGS. 13F and G, insert, black arrowheads), but in contrast to these, vegetative hyphae of KRE5- and KRE6-RNAi strains often burst to released lipid vesicles (FIGS. 13F and G, arrows; FIG. 13H).

[0242] In order to investigate whether reduction of transcript abundance led to reduced Kre5 and Kre6 protein contents, the KRE5 and KRE6 genes of the WT strain and of KRES5:RNAi and KRE6:RNAi strains were replaced by the KRES5:mCherry or KRE6:mCherry construct. Two representative KRES5:mCherry or KRE6:mCherry replacement strains were comparatively analyzed by quantitative fluorescence microscopy (FIGS. 13I and K). Vegetative hyphae of the two RNAi strains showed a reduction of mCherry fluorescence by 64.4±12.9% and 68.6±15.1% in KRE5-RNAi strains (FIG. 13I), and 59.3±16.8% and 62.4±11.9% in KRE6-RNAi strains (FIG. 13K), clearly indicating that not only transcript abundance, but also Kre5 and Kre6 protein concentrations were down-regulated in the RNAi strains. To analyze differences between alkali-soluble β-1,6-glucan levels (Gilbert N M et al., 2010) in cell walls of the C. graminicola WT and RNAi strains, alkali-soluble β-1,6-glucan of these strains was spotted onto nylon membranes and incubated with the β-1,6-GBP:YFP probe (FIG. 9). Although this method determines the total β-1,6-glucan contents in the cell walls only semi-quantitatively, it clearly showed that β-1,6-glucan contents were severely reduced in KRE5- and the KRE6-RNAi strains, as compared with the WT strain (FIG. 13L).

[0243] As the phenotypes of the KRE5- and KRE6-RNAi strains had striking similarities with those of GLS1-RNAi strains, the GLS1 transcript levels and β-1,3-glucan contents were also evaluated in KRE5- and KRE6-RNAi strains. Indeed, the GLS1 transcript levels were reduced in vegetative hyphae of KRE5- and KRE6-RNAi strains (FIG. 13M), and so were the β-1,3-glucan contents, as indicated by aniline blue fluorochrome fluorescence quantification (FIG. 13N) (Oliveira-Garcia and Deising, 2013) .

[0244] These data show that KRE5 and KRE6 play essential roles in formation of β-1,6-glucan bonds, that β-1,3- and β-1,6-glucan synthesis are co-regulated and that the synthesis of a β-1,3-glucan network is indispensable for cell wall function in vegetative hyphae of C. graminicola. By reduction of KRE5 and KRE6 expression, the GLS1 expression is hampered and, besides β-1,6-glucan synthesis, also β-1,3-glucan synthesis is disturbed. This is a technical improvement over the targeted reduction of the GLS1 transcription (Oliveira-Garcia and Deising, 2013).

[0245] KRE5 and KRE6 of C. graminicola are Required for Asexual Sporulation, Adhesion, and Differentiation of Functional Appressoria

[0246] Efficient asexual sporulation is a fungal hallmark and indispensable for spreading of fungal plant diseases. Intense fluorescence of conidia of KRE5:mCherry or KRE6:mCherry replacement strains and intense labeling by the β-1,6-GBD:YFP-probe (FIG. 10) suggested that expression of KRE5 and KRE6 and synthesis of β-1,6-glucan is required for formation of conidia. Indeed, reduction of KRE5 and KRE6 transcript abundance by RNAi strongly reduced asexual sporulation rates, irrespective of the addition of osmolytes to the growth medium (FIG. 9A). Moreover, conidial size and shape (FIGS. 9B, C, F, and I) were strongly affected, and coalesced cytoplasm was visible in conidia of KRE5- and KRE6-RNAi strains (FIGS. 9D and G, arrows). In addition, conidia of the RNAi strains frequently burst and released lipid vesicles (FIGS. 9E and H, and FIG. 9K). Increased rates of conidial bursts in the RNAi strains further suggested that conidial cell wall rigidity is affected by down-regulation of KRE5 and KRE6 transcript abundance. Resistance to cell wall-degrading enzymes is a valid criterion for cell wall rigidity (Oliveira-Garcia and Deising, 2013), and we therefore incubated conidia with cell wall lyzing enzymes from Trichoderma harzianum and measured rates of protoplast formation. Clearly, conidia of KRE5- and KRE6-RNAi strains protoplasted faster than those of the WT strain (FIG. 9L), confirming the hypothesis of cell wall defects in RNAi strains. Introduction of cell wall defects by treatment of the mammalian pathogen Candida albicans with the β-1,3-glucan synthase inhibitors, i.e. echinocandin fungicides, caused up-regulation of chitin synthases as a compensatory response (Walker et al., 2008, PLoS Pathogens 4: e1000040). In conidia of KRE5- and KRE6-RNAi strains of C. graminicola CHSV transcript abundance was significantly increased, supporting the idea that cell wall defects exist in conidia of these strains (FIG. 9M). GLS1 transcript levels, in contrast, were strongly reduced in both KRE5- and KRE6-RNAi strains (FIG. 9M), again suggesting co-regulation of β-1,3- and β-1,3-glucan synthesis (see FIGS. 13M and 13N).

[0247] RNAi strains exhibiting KRE5 or KRE6 transcript abundance of less than 25% did not sporulate under any of the growth conditions tested.

[0248] When osmotically stabilized, conidia of the WT and RNAi strains germinated and differentiated appressoria on artificial substrata (FIG. 15). Intriguingly, while germ tubes of the WT strain were non-melanized and short, 80% and 74% of the germ tubes formed by KRE5- and KRE6-RNAi strains, respectively, were swollen and/or melanized (FIG. 15A, KRE5-RNAi, lower micrographs, arrowheads; FIG. 15B). While appressoria of the WT strain formed on polyethylene sheets did not develop further and remained unaltered, approx. 97% of the appressoria formed by KRE5-RNAi strains and 75% of the appressoria formed by KRE6-RNAi strains ruptured spontaneously (FIG. 15A, upper micrographs, short black arrows; FIG. 15C), released lipid droplets, (FIG. 15A, KRE5- and KRE6-RNAi, long black arrows), and collapsed (FIG. 15A, KRE5- and KRE6-RNAi, upper micrographs, asterisks).

[0249] Interestingly, while the vast majority of the KRE5-RNAi strains released cellular components (FIG. 15A, KRE5-RNAi, upper micrograph, arrow) preferentially at the germ tube-appressorium border (FIG. 15A, KRE5-RNAi, upper micrograph, arrowhead), approx.15% of the appressoria of KRE6-RNAi strains released droplets through the entire appressorial cell wall, possibly due to non-rigidified cell walls with increased pore sizes (FIG. 15A, KRE6-RNAi, lower left micrograph, arrowheads).

[0250] As tight adhesion of appressoria is required for direct penetration of the plant cell wall, efficient adhesion is essential for full virulence. This is particularly true for pathogens that invade their hosts primarily by exertion of force. As compared with the WT strain, adhesion of infection structures of KRE5-RNAi strains 1-3, and of KRE6-RNAi strains 1 and 2 was reduced by more than 95% on all surfaces tested, i.e. onion epidermal cells, polyester and glass (FIG. 15D).

[0251] Interestingly, also appressorial cell wall elasticity was affected by down-regulation of KRE5 and KRE6 transcript abundance (FIG. 16). When KRE5-RNAi and KRE6-RNAi strains formed appressoria in sterile distilled water, the vast majority of these cells ruptured (FIGS. 15A and C). The minor fraction of appressoria that did not explode allowed analyzing the rigidity of the appressorial cell wall by measuring appressorial diameters in solutions differing in osmotic potential (FIG. 16). In distilled water, both KRE5- and KRE6-RNAi strains showed significantly increasing appressorial diameters. After addition of the osmolyte PEG6000 (400 mg/mL), however, appressoria shrunk by approx. 50% and reached the diameter of WT appressoria, indicating that appressorial cell walls of the RNAi strains are highly elastic. The appressorial diameter of the WT strain was unaffected by the osmotic potential of their environment (FIGS. 16A and B). Increased appressorial cell wall elasticity is likely to reduce the appressorial turgor pressure, as shown previously for appressoria of C. graminicola GLS1-RNAi strains. Indeed, WT appressoria showed incipient cytorrhizis at a PEG6000 concentration of more than 400 mg/mL, whereas a concentration of approx. 100 mg/mL was sufficient in the KRE5- and KRE6-RNAi strains (FIG. 16C), indicating that mutants affected in β-1,6-glucan synthesis had severely reduced appressorial turgor pressure.

[0252] The data shown here indicate that formation of β-1,6-glucosidic bonds is required for germination, adhesion of infection cells, cell wall rigidity, and for generation of appressorial turgor pressure.

[0253] KRE5 and KRE6 are Required for Appressorial Penetration, Invasive Growth and Pathogenicity on Maize Leaves

[0254] In order to investigate the role of KRE5 and KRE6 of C. graminicola in plant infection, conidia of the WT strain and of KRE5- and KRE6-RNAi strains were inoculated onto intact and wounded segments of the youngest fully expanded leaf of two- to three-week-old maize plants, and virulence was evaluated seven days after inoculation (DAI). The WT strain caused severe disease symptoms on both intact and wounded leaves, but none of the RNAi strains tested was able to invade intact leaves (FIG. 17A, non-wounded). These data were not surprising, as appressorium function was strongly affected in KRE5- and KRE6-RNAi strains (FIGS. 15 and 16). To circumvent appressorial defects and to analyze host tissue invasion, we performed wound inoculation experiments. On wounded leaves the RNAi strains caused minor necroses at the margins of the wounds (FIGS. 17A, wounded). Assessment of fungal development by quantitative PCR (qPCR), using internal transcribed spacer two (ITS2) primers (Behr et al., 2010, Molec. Plant-Microbe Interact. 23: 879-892), fully confirmed the macroscopically observed virulence defects of KRE5- and KRE6-RNAi strains (FIG. 17B).

[0255] Differential interference contrast (DIC) microscopy was employed to characterize the role of KRE5 and KRE6 in wound colonization of C. graminicola. The WT strain formed fast growing thin necrotrophic hyphae immediately after wound inoculation, without establishing a biotrophic interaction (FIG. 17C, WT, arrowheads). When KRE5-RNAi or KRE6-RNAi strains were inoculated onto wounded leaves, slowly growing hyphae with brown swellings formed in host cells (FIG. 17C, KRE5-RNAi and KRE6-RNAi, asterisks). The hyphal swellings in both RNAi strains were connected by thin hyphal segments (FIG. 17C, KRE5-RNAi and KRE6-RNAi, arrowheads, comparable to those seen in GLS1-RNAi strains (Oliveira-Garcia and Deising, 2013). In spite of the distinct cell wall defects, hyphae of KRE5- and KRE6-RNAi strains were able to penetrate the anticlinal maize cell walls (FIG. 17C, KRE5-RNAi and KRE6-RNAi, arrows). Interestingly, both RNAi strains grew preferentially in close contact with the maize cell walls. By contrast, infection hyphae of the WT strain were thin and grew across the cells and only rarely in association with the host cell wall (FIG. 17C).

[0256] Dramatic biotrophy-specific down-regulation of β-1,6-glucan synthesis (FIG. 10) perfectly mirrors the profile of β-1,3-glucan synthesis in infection structures of C. graminicola (Oliveira-Garcia and Deising, 2013). Overexpression of GLS1 in biotrophic hyphae and exposition of β-1,3-glucan on surfaces of these cells led to dramatic defense responses in maize (Oliveira-Garcia and Deising, 2013), raising the question whether overexpression of KRE5 and KRE6 would likewise activate defense responses. In order to address this question, we constructed mutants overexpressing these two β-1,6-glucan synthesis genes under the control of the strong constitutive trpC promoter of Aspergillus nidulans (FIG. 18A). Two mutants with single integration events of the KRE5 and KRE6 overexpression constructs were identified and used in further studies (FIG. 18B). The mutants exhibited significantly increased KRE5 and KRE6 transcript abundances (FIG. 18C) and showed growth rates comparable to that of the WT strain (FIG. 18D).

[0257] Intriguingly, while the PtrpC:KRE5 and PtrpC:KRE6 overexpression strains caused severe disease on wounded maize leaves, they were unable to evoke anthracnose disease symptoms on intact leaves. By contrast, both WT and PtrpC:KRE5 and PtrpC:KRE6 overexpression strains exhibited full virulence on wounded leaves (FIG. 19A). Pathogenicity defects of the KRE-overexpressing strains on intact leaves was fully confirmed by qPCR analyses (FIG. 19B). The inability to cause disease was surprising because both, PtrpC:KRE5 and PtrpC:KRE6 strains efficiently formed appressoria on the intact plant cuticle, invaded the host epidermal cell and formed an infection vesicle (FIG. 19C, non-wounded, ap and iv). Excitingly, while the WT strain formed primary hyphae without eliciting visible plant defense responses (FIG. 19C, non-wounded, WT, iv and ph), massive formation of darkly pigmented vesicles was observed in plant cells infected by PtrpC:KRE5 and PtrpC:KRE6 strains, and these vesicles associating with the invading infection vesicle and may be causal for growth arrest of the overexpression strains at this early stage of the infection (FIG. 19C, non-wounded, PtrpC:KRE5 and PtrpC:KRE6 strains, arrows). Interestingly, also the hyphae of PtrpC:KRE5 and PtrpC:KRE6 strains invading the host tissue from wounds were decorated with dark vesicles (FIG. 19C, wounded, PtrpC:KRE5 and PtrpC:KRE6, arrows). In contrast, these vesicles were not seen in wounded leaves infected by the WT strain (FIG. 19C, wounded, WT).

[0258] To further characterize plant defense responses at the cellular/histological level, cell wall responses, including formation of papillae, were analyzed by UV-fluorescence microscopy and 3,3′-diaminobenzidine (DAB) staining. Both WT as well as KRE5 and KRE6 overexpressing strains formed large numbers of dark melanized appressoria on the plant surface (FIG. 19D, arrows). However, only the appressoria of the PtrpC:KRE5 and PtrpC:KRE6 strains were decorated by brightly fluorescing papillae (FIG. 19D, UV, PtrpC:KRE5 and PtrpC:KRE6, arrowheads), and occasionally whole cell fluorescence was observed (FIG. 19D, UV, PtrpC:KRE6, asterisk). Quantification of papilla-based defense responses showed that less than 10% of the WT appressoria provoked papilla formation, whereas 49.8 to 89.6% of the appressoria of the PtrpC:KRE5 and PtrpC:KRE6 strains were decorated by plant cell wall appositions (FIG. 19E). Furthermore, PtrpC:KRE5 and PtrpC:KRE6 strains evoked a strong H202 response, as visualized by massive browning after DAB staining (FIG. 19D, DAB, PtrpC:KRE5 and PtrpC:KRE6). In cells infected by the WT strain these responses did not occur (FIG. 19D, DAB, WT).

[0259] These data strongly suggest that overexpression of KRE5 and KRE6 during the biotrophic phase of the interaction between C. graminicola and maize leads to exposition of β-glucan on the hyphal surface and to induction of defense responses. Induction of β-glucan-induced defense responses have been observed after overexpression of GLS1 in biotrophic hyphae of this fungus, and RNAseq analyses helped identifying genes putative defense-related genes on a genome-wide level (Oliveira-Garcia and Deising, 2013). Candidate genes identified included genes encoding classical PR proteins such as PR1, a number of different PR2 proteins, i.e. β-1,3-glucanases, a PR3 protein representing a chitinase, as well as PR5. Furthermore, plant cell wall response genes encoding cellulose synthase-like proteins and peroxidases, as well as genes encoding four different terpene synthases, putatively involved in phytoalexin synthesis, have been identified. As these genes have been identified as β-glucan-triggered genes, we analyzed transcript abundance of these genes in maize plants inoculated with the WT C. graminicola strain as well as strains overexpressing KRE5 and KRE6 during the biotrophic phase of pathogenesis, taking advantage of RT-qPCR (FIG. 19).

[0260] Indeed, all of the 18 putative defense genes tested were significantly up-regulated after inoculation with the PtrpC:KRE5 and PtrpC:KRE6 strains, as compared to the plants inoculated with the WT strain and with mock-treated plants. While PR1 transcripts were 9.1- and 8.3-fold increased in plants inoculated with PtrpC:KRE5 and PtrpC:KRE6 strains, respectively, different PR2 genes were up-regulated between 10- and 100-fold. The thaumatin-like PR5, which is thought to bind to β-1,3-glucan, was up-regulated 11.5- and 9.2-fold after inoculation with PtrpC:KRE5 and PtrpC:KRE6 strains, respectively. Remarkably, the CTB gene, the callose synthase-like genes CS45 and CS31, as well as the peroxidase gene PX82 were up-regulated more than 250-fold. Furthermore, the four terpene synthase genes TPS2, TPS3, TPS7, and TPS10 were up-regulated between 40- and 170-fold in plants inoculated with strains synthesizing β-1,6-glucan in the biotrophic phase of infection (FIG. 19).

[0261] Collectively, these data show that the β-1,6-glucan biosynthesis genes KRE5 and KRE6 are required for differentiation of functional infection structures and that biotrophy-specific down-regulation of synthesis of branched β-glucan in the hemibiotroph C. graminicola is required for evading PAMP-triggered plant immune responses.

[0262] The cell wall of an infecting fungal hypha is the first structure establishing a physical contact with the host plant. Host tissue invasion requires highly coordinated synthesis of various cell wall polymers at the hyphal apex and sub-apical cross-linking of polymers, leading to formation of the rigid scaffold responsible for shape and structural integrity of the hypha. However, in plant pathogens maintenance of hyphal structural rigidity is mediated by invariable cell wall polymers, collectively referred to as pathogen-associated molecular patterns (PAMPs). At host invasion, the pathogen is confronted by the dilemma that, on one hand synthesis of structural cell wall polymers is indispensable, and on the other hand PAMP exposure bears the risk of recognition of pathogen attack by the plant. So far, primarily the role of major fungal cell wall polymers in pathogenesis has been studied in plant pathogenic filamentous fungi. Others, which may represent quantitatively minor, but possibly functionally important polymer fractions, have so far been disregarded. Here we show that KRE5 and KRE6, likely needed for introduction of β-1,6-branches into β-1,3-glucan polymers and for cross-linking of polymers, are required for functional integrity of vegetative and pathogenic hyphae, and that infection structure-specific control of expression of these genes is indispensable for the establishment of a compatible parasitic interaction between C. graminicola and maize.

[0263] Structural Integrity of the Cell Wall is Essential for Vegetative Growth, Infection Structure Function and Host Tissue Invasion

[0264] Remarkably, down-regulation of transcript abundance of KRE5, KRE6, and of GLS1 by RNAi resulted in comparable phenotypes, all of which were very severe. For example, reduced growth rates and hyper-pigmented swellings were observed in vegetative hyphae (FIG. 13), and conidiation rates were strongly reduced, with severely misshapen conidia formed (FIG. 9). Furthermore, appressoria of RNAi strains were unable to control turgor pressure and burst (FIG. 15), and infection hyphae exhibited swellings and were unable to cause clear disease symptoms (FIG. 17). Taken together, these data indicate that the β-1,3-β-1,6-glucan network is indispensable at all major stages of fungal development, including pathogenesis.

[0265] In conidia, a complex structural network of polysaccharides defines the shape of the spore and protects it from detrimental compounds produced by bacteria and fungi of the phylloplane. In addition, in plant pathogenic fungi the cell wall mediates adhesion of spores to the cuticle of the host (FIG. 15D; see (Oliveira-Garcia and Deising, 2013). In Aspergillus nidulans, analyses of transcriptional changes occurring during the transition from hyphal growth to conidiation showed that ˜20% of all genes were significantly altered at the transcriptional level. Intriguingly, several of the top 20 up-regulated genes encode enzymes involved in cell wall biogenesis. Moreover, not only mutants carrying direct defects in cell wall biogenesis genes, but also iron uptake mutants of C. graminicola, i.e. the siderophore mutants Δsid1, Δnps6, and the ferroxidase mutant Δfet3-1, show significant sporulation deficiencies, likely due to erroneous regulation of cell wall biogenesis genes. These data suggest that conidiation requires complex regulation of a large number of genes, only some of which are directly incolved in cell wall biogenesis. It is important to note that in plant pathogenic fungi the ability to sporulate is a major factor not only determining spread of disease in the field, but also in disease initiation, as infection cells like appressoria are directly derived from spores in most cases.

[0266] As appressorial cell walls need to control significant turgor pressure, it is conceivable that the rate of appressorium differentiation and function is severely affected in KRE5- and KRE6-RNAi strains. Importantly, more than 90% and approx. 80% of the appressoria formed by KRE5-and KRE6-RNAi strains, respectively, exploded (FIG. 8C). For comparison, approx. 15% of the appressoria formed by class I GLS1-RNAi strains ruptured (Oliveira-Garcia and Deising, 2013). Class I GLS1-RNAi strains had GLS1 transcript abundances reduced by ca. 35-45%, which is comparable to the reduction in transcript concentration in KRE5- and KRE6-RNAi strains (FIGS. 6A and B, and (Oliveira-Garcia and Deising, 2013). The fact that appressorium function was strongly affected in these strains is suggestive of the role of β-1,6-bonds in cross-linking of cell wall polymers and in control of the appressorial turgor pressure. However, this interpretation must be treated with caution, as transcript concentrations and fluorescence staining of β-1,3-glucan by aniline blue fluorochrome (Oliveira-Garcia and Deising, 2013) and of β-1,6-glucan linkages by the β-1,6-GBP:YFP probe do not directly prove the existence of chemical β-1,3-β-1,6-links. As shown for A. fumigatus, enzymatic digestions with purified recombinant endo-cleaving β-1,3-glucanases and chitinases, fractionation of cleavage products by high performance liquid chromatography, and analysis of the chemical structures of and chemical bonds between the products by NMR spectrometry and GCMS clearly indicated the introduction of β-1,6-branches into linear β-1,3-glucanchains (Fontaine et al., 2000, J. Biol. Chem. 275: 27594-27607). Comparable studies would also be suited to answer the question whether β-1,6-bonds are restricted to branching points of β-1,3-strands, or whether short β-1,6-linked glucan oligomers exist in cell walls of C. graminicola. However, the occurrence of such bonds is difficult to analyze in individual infection cells such as appressoria or in planta differentiated infection hyphae, due to several reasons. First, C. graminicola does not differentiate infection structures synchronously, so that samples of infected leaves would contain mixtures of different types of hyphae. Second, chemical analysis requires cell wall masses which can be produced when vegetative hyphae are to be analyzed, but not when cell walls of specific infection structures are of interest. Third, some infection structures, such as appressoria or infection hyphae of KRE5- and KRE6-RNAi strains are melanized or contain other pigments, which may interfere with the analyses performed by Fontaine et al., 2000. Thus, although fluorescence labeling with polymer-specific probes may not provide full chemical details of the cell wall structure, it is sufficient to show whether certain polymers or bonds exist in specific infection structures and at specific stages of pathogenesis.

[0267] β-1,6-glucan-mediated cross-linking of cell wall polymers likely is a general key-process in appressorium function and initiation of host invasion, and not restricted to fungi differentiating melanized appressoria. Recent work with a polyketide synthase 1 (Pks1) deficient mutant of C. graminicola has shown that the appressorial turgor pressure does not require melanization (Ludwig et al., 2014, Mol. Plant-Microbe Interact. 27:315-327). Furthermore, turgor pressure and penetration competence of the Asian soybean rust fungus Phakopsora pachyrhizi, which penetrates its host directly through non-melanized appressoria, was determined by transmitted light double-beam interference Mach-Zehnder microscopy, in combination with incipient cytorrhysis experiments. The turgor pressure generated in the appressoria of this fungus corresponded to 5.13 MPa (Loehrer et al., 2014, New Phytol. 203: 620-631), which is similar to a turgor pressure of 5.35 MPa generated by melanized appressoria of C. graminicola (Bechinger et al., 1999, Science 285: 1896-1899).

[0268] Interestingly, also the defects in infection hyphae formed in the host cell by KRE5- and KRE6-RNAi strains resemble those of GLS1-RNAi strains (FIG. 10C, compare with (Oliveira-Garcia and Deising, 2013). Hyphal swellings and brown pigmentation clearly indicate cell wall defects, likely due to inappropriate cross-linking of polymers. An interesting though unexplained observation was that infection hyphae of KRE5- and KRE6-RNAi strains grew in close contact with the host cell wall (FIG. 10C).

[0269] Infection Structure-Specific Regulation of PAMP Exposition is Indispensable for Escaping Immune Responses

[0270] Synthesis of structurally invariable cell wall polymers is indispensable during fungal pathogenic development. Therefore, in order to recognize pathogen attack, plants have evolved plasma membrane-localized pattern recognition receptors (PRRs), the activation of which by PAMPs evokes broad spectrum immune responses (Nurnberger et al., 2004, Immunol, Rev. 198: 249-266; Muthamilarasan and Prasad, 2013, J. Biosci. 38: 1-17). For example, chitin-derived 13-1,4-N-acetyl glucosamine oligomers are recognized by the two LysM receptors CEBiP and OsCERK1 in rice (Shimizu et al., 2010, Plant J. 64: 204-214), and sub-nanomolar concentrations of N-acetyl-chitooligosaccharides are sufficient to induce plant defense responses in tomato (Felix et al., 1993, Plant J. 4: 307-316). Using soybean membranes, ligand displacement assays performed with a ¹²⁵J-labeled glucan elicitor released from mycelial walls of the oomycete Phytophthora megasperma f.sp. glycinea yielded a 50% inhibitory concentration for branched β-1,3-1,6-β-glucans of 3 nM (Cosio et al., 1990, FEBS Lett. 271: 223-226).

[0271] In order to escape the dilemma of the need of strengthening the wall of infection hyphae by structural polymers on one hand, and the necessity of avoiding PAMP recognition on the other, plant pathogenic fungi have developed an array of mechanisms in order to compromise PAMP perception. For example, the hemibiotrophic rice blast fungus M. oryzae and the biotrophic tomato pathogen Cladosporium fulvum secrete LysM domain-containing effector proteins such as Slp1, Avr4 or Ecp6, sequestering polymeric chitin exposed on hyphal surfaces or small chitin oligomers released by the activity of chitinases (de Jonge et al., 2010; Mentlak et al., 2012; van Esse et al., 2007, Mol. Plant-Microbe Interact. 20: 1092-1101). As LysM effectors are widely conserved in the fungal kingdom, sequestration of chitin may represent a common strategy of host immune evasion in many pathogens, including Colletotrichum species. Correspondingly, conversion of surface-exposed chitin to its non-acetylated derivative chitosan is specifically initiated at host invasion by the broad bean rust fungus Uromyces fabae, the wheat stem rust Puccinia graminis as well as the maize anthracnose fungus C. graminicola. Deacetylation of surface-localized chitin is likely to compromise recognition of the fungal attack, as chitosan is a poor chitinase substrate and as chitosan fragments exhibit lower elicitor activity than chitin fragments. Masking of hyphal surfaces may also be accomplished by apposition of molecules either lacking or showing reduced PAMP activity. For example, apposition of polymeric α-1,3-glucan protects infection hyphae of M. oryzae form chitinase and β-1,3-glucanase attack and thus interferes with PAMP production. Accordingly, transgenic rice plants expressing the α-1,3-glucanase gene of Bacillus circulans showed increased resistance against the ascomycetes M. oryzae and Cochlioborus miyabeanus, as well as the basidiomycete Rhizoctonia solani (Fujikawa et al., 2012, PLoS Pathog. 8: e1002882).

[0272] β-glucans are considered to be conserved across different classes of microorganisms, including fungi and oomycetes, and fragments of this polymer, like chitin fragments, represent potent PAMPs. Interestingly, Klarzynski et al., 2000, Plant Physiol. 124: 1027-1038 have shown that laminarin, a linear β-1,3-glucan from the brown alga Laminaria digitata, elicits defense responses in tobacco. Studies including laminarin, high molecular weight β-1,3-β-1,6-glucan, as well as different β-1,3-glucan oligomers indicated that defense responses were elicited by linear β-1,3-glucan oligomers, with a penta-glucan being the smallest active molecule.

[0273] Transcriptional Silencing Activity in HIGS Corn Lines

[0274] Transformation of corn with the plant transformation vector p7U-ubi RGA2intronII HIGS GLRG 05611 allowed the identification of HIGS corn lines which showed a transcriptional silencing activity against the KRE5 gene of C. graminicola (GLRG_05611 gene). In comparison to the inbred line A-188, which was used for corn transformation, the transgenic corn lines M-T-001, M-T-003, M-T-005, M-T-006 and M-T-024, which were transformed with p7U-ubi_RGA2intronII_HIGS_GLRG_05611, showed a reduction of reporter gene activity caused by siRNAi mediated degradation of the reportergene construct pABM_ubiluci_GLRG_05611 (FIG. 21). A transgenic RNAi control line, which was transformed with a RNAi construct targeting another fungal gene, revealed no silencing activity against the GLRG_05611 gene.

[0275] Enhanced Resistance of the HIGS Corn Lines M-T-001, M-T-003, M-T-005, M-T-006 and M-T-024

[0276] Resistance assays on leaf segments of maize (Zea maize) plants to show enhanced fungal resistance could be done as described (Oliveira-Garcia E, Deising H B (2013).

[0277] Fungal Strains, Culture Conditions, Infection Structure Differentiation and Virulence Assays

[0278] The wild-type (WT) strain M2 of C. graminicola (Ces.) G. W. Wilson (teleomorph Glomerella graminicola D. J. Politis) and RNAi strains generated in this study were cultivated on oat meal agar (OMA; Werner et al., 2007), complete medium (CM; Leach et al, 1982, Journal of General Microbiology 128: 1719-1729), potato-dextrose (PD; Difco Laboratories, Sparks, Md., USA), synthetic minimal medium (SMM; 10 g glucose; 1 g Ca(NO3)2; 0.2 g KH2PO3; 0.25 g MgSO4 and 0.054 g NaCl per L) or synthetic complete medium (SCM without amino acids; Becton Dickinson, Sparks, Md., USA), with amino acids added as described (Treco and Lundblad, 1993, Basic techniques of yeast genetics, New York: John Wiley & Sons). To grow RNAi strains, the media were supplemented with 0.15 M KCl, 1 M sorbitol, or 0.5 M sucrose.

[0279] Incubation of liquid and solidified media were as described (Oliveira-Garcia and Deising, 2013).

[0280] The Saccharomyces cerevisiae reference strain Y00000 (parental S288C) (Mat a, his3D1, leu2D0, met15D0, ura3D0), the Δkre5 mutant Y21633 (BY4743; Mat a/a; his3D1/his3D1; leu2D0/leu2D0; lys2D0/LYS2; MET15/met15D0; ura3D0/ura3D0; YOR336w::kanMX4/YOR336w) and the Δkre6 mutant Y05574 (BY4741; Mat a; his3D1; leu2D0; met15D0; ura3D0; YPR159w::kanMX4) (Euroscarf, Frankfurt, Germany) were grown at 30° C. and 150 rpm in liquid Yeast Extract Peptone Dextrose or Yeast Extract Peptone Dextrose Sorbitol (YPD/YPDS; Difco, Sparks, Md., USA.) lacking uracil. S. cerevisiae cells producing the yellow fluorescing β-1,6-glucan-binding protein were grown on yeast synthetic complete medium (YSCM) (Difco, Sparks, Md., USA). Solidified media contained 1.5% (w/v) agar agar (Difco, Sparks, Md., USA). Calcofluor White and killer toxin K1 were added to a concentration of 50 μg/mL.

[0281] In vitro infection structure differentiation and virulence assays on leaf segments of maize (Zea maize cv Mikado) plants or on epidermal cell layers from onion (Allium cepa cv Grano) bulbs were done as described (Oliveira-Garcia and Deising, 2013).

[0282] All experiments were performed in triplicate and with four repetitions.

[0283] Complementation of the S. cerevisiae Δkre5 and Δkre6 Mutant with the C. graminicola KRES and KRE6 cDNA

[0284] In order to synthesize cDNA of KRE5 and KRE6, total RNA was extracted (Chirgwin et al, 1979, Biochemistry 18: 5294-5299) from vegetative mycelium of C. graminicola. mRNA was isolated using the Nucleotrap mRNA Purification Kit, and cDNA synthesis was performed using the Creator SMART cDNA Library Construction Kit (BD Biosciences Clontech, Heidelberg, Germany). The primers CgKRE5Sfil-Fw and CgKRE5Sfil-Rv, CgKRE6Sfil-Fw and CgKRE6Sfil-Rv have been used to amplify the KRE5 and KRE6 cDNA, which was cloned into the SfilA-B sites of the yeast cDNA expression vector pAG300 (www.addgene.org; (Oliveira-Garcia and Deising, 2013). These primers, and others mentioned here, are listed in Table 1. Correct orientation of the DNA was confirmed by sequencing, using primer pAG300-Fw. The empty vector (pAG300) and the vectors containing the KRE5 and KRE6 cDNA were transformed into S. cerevisiae strains Y21633 and Y05574, respectively, using the lithium acetate procedure (Becker and Lundblad, 2001, Introduction of DNA into yeast cells. In: Ausubel F M, Brent R, Kingston R E, Moore D D, Seidman J G et al., editors. Curr Protoc Mol Biol. New York: John Wiley & Sons. pp. 13.17.11-13.17.10) to yield the complemented yeast strains Δkre5 (KRE5) and Δkre6 (KRE6). As control, strains Y21633 and Y05574 were also transformed with empty pAG300, yielding Δkre6 (pAG300) and Δkre6 (pAG300). Yeast cells were grown on YSCM agar lacking uracil.

[0285] Targeted deletion, promoter exchange and overexpression of KRE5 and KRE6, construction of RNAi strains and generation of C. graminicola KRES5:mCherry and KRE6:mCherry replacement strains

[0286] For targeted deletion of the 4581-bp C. graminicola KRE5 gene, the Nourseothricin acetyl-transferase gene Nat-1 from Streptomyces noursei was PCR-amplified from pNR1 (Malonek et al., 2004), using primers Nourse1pNR1-Fw, and Nourse1pNR1-Rv. The 1022-bp 5′ and the 1007-bp 3′ flanking regions of the KRE5 gene were amplified from genomic DNA, using primers CgPKRE5-fw, CgP1KRE55′-flank-ry and CgTKRE53′-flank-fw and CgTKRE5-rv, respectively. The products were fused by joint-PCR (Yu et al., 2004, Fungal Genet. Biol. 41: 973-981), and nested primers CgPKRE5nest-fw and CgTKRE5nest-ry were used to amplify the 4210-bp KO construct, which was transformed into conidial protoplasts (Werner et al., 2007). Tests for homologous integration of the KO construct was done with primers CgPKRE5test-fw and CgTKRE5test-rv.

[0287] For targeted deletion of the 1490-bp C. graminicola KRE6 gene, the Nourseothricin acetyl-transferase gene Nat-1 from Streptomyces noursei was PCR-amplified from p1199 (Namiki et al., 2001, Mol. Plant-Microbe Interact. 14: 580-584), using primers Gen1pNR1-Fw and Gen1pNR1-Rv. The 998-bp 5′ and the 1003-bp 3′ flanking regions of the KRE6 gene were amplified from genomic DNA, using primers CgPKRE6-fw, CgP1KRE65′-flank-ry and CgTKRE63′-flank-fw and CgTKRE6-rv, respectively. The products were fused by joint-PCR (Yu et al., 2004), and nested primers CgPKRE6nest-fw and CgTKRE6nest-ry were used to amplify the 4210-bp KO construct, which was transformed into conidial protoplasts (Werner et al., 2007). Tests for homologous integration of the KO construct was done with primers CgPKRE6test-fw and CgTKRE6test-rv.

[0288] The RNAi cassette from plasmid pRedi (Janus et al., 2007, Appl. Environ. Microbiol. 73: 962-970) was used to generate an RNAi constructs targeting KRE5 and KRE6 transcripts, respectively. The 910-bp KRE5 and 926-bp KRE6 sense and antisense fragments were amplified from genomic DNA of C. graminicola, using the primers RNAi(KRE5)-fw and RNAi(KRE5)-Rv, RNAi(KRE5)i-fw and RNAi(KRE5)i-Rv, RNAi(KRE6)-fw and RNAi(KRE6)-Rv, and RNAi(KRE6)i-fw and RNAi(KRE6)i-Rv. The sense and antisense fragments were used to replace the XhoI-SnaBI and BgIII-ApaI fragments of pRedi, and were thus separated by 135 bp of the intron of the M. oryzae Cut2 gene (NCBI: XM_365241.1), existing in pRedi, as a linker (Janus et al., 2007). The resulting 6.75 kb and 6.85 kb RNAi constructs were excised from pRedi by DraI digestion, purified by gel elution, transformed into conidial protoplasts of C. graminicola and single spore isolates were generated (Werner et al., 2007).

[0289] To study cell-specificity of expression of KRE5 and localization of the protein, a KRES5:mCherry replacement construct, consisting of the 1 kb 3′-end of the coding region of the KRE5 gene fused in frame to the mCherry gene, followed by the Hyg^{R} resistance cassette and the 1 kb 5′-non-coding sequence of KRE5 containing the terminator, was transformed into the C. graminicola WT strain. The 5′-coding region of KRE5 was amplified with the primers CgKRESGFP-Fw and CgKRE5GFP5′-flank-Rv, using genomic DNA as the template. The mCherry gene and the Hyg^{R} cassette were amplified using primers EGFP-Fw and HygR-Rv, with plasmid pSH1.6EGFP, kindly provided by Amir Sharon, Tel Aviv University, Israel, as template. Using genomic DNA as template, the 3′-flank of KRE5 was amplified with primers CgKRE5GFP3′-flank-Fw and CgTKRE5GFP-Rv. The KRES5:mCherry construct was fused by double-joint-PCR (Yu et al., 2004), and the complete 6.2 kb fragment was amplified with nested primers CgKRE5:GFP.nest-fw and CgKRE5:GFP.nest-rv. Phusion® High-Fidelity DNA Polymerase (New England Biolabs, Ipswich, Mass., USA) was used in all PCR reactions. The KRES5:mCherry construct was transformed into conidial protoplasts (Werner et al., 2007), and single spore isolates were tested for site-specific integration and replacement of the WT KRE5 gene by Southern hybridization.

[0290] For overexpression of KRE5, the trpC promoter of A. nidulans was amplified from pSM1 (Poggeler et al., 2003, Curr. Genet. 43: 54-61), using primers PtrpC-Sac1-Fw and PtrpC-Sac1-Rv. The toxB promoter of Pyrenophora tritici-repentis was amplified from pCM29 (Andrie et al., 2005, Mycologia 97: 1152-1161), using primers PtoxB-Sac1-Fw and PtoxB-Sac1-Rv. The PCRs products were digested by SacI, purified, and ligated into SacI-digested pNR1. The complete KRE5 gene was amplified with the primers CgKRE5NotI-Fw and CgTKRE5NotI-Rv. The 7050-bp PCR product was Not!-digested, purified and ligated into pNR1. The resulting 10,032-bp (PtrpC:KRES5:NatR) construct was amplified using primes NatOvExp.nest-Fw and NourspNR1-Rv, and transformed into conidial protoplasts (Werner et al., 2007).

[0291] Single spore isolates were tested by Southern hybridization for numbers of the KRE5 overexpression constructs integrated.

[0292] Generation of a yellow fluorescing β-1,6-glucan-binding protein allowing specific detection of β-1,6-bonds in cell wall polymers

[0293] 1. In order to synthesize the yellow fluorescing β-1,6-glucan-binding protein probe, the β-1,6-glucan-binding domain (nt 90 to 360 ABC) of the endo13-1,6-glucanase of C. graminicola (GLRG_00130.1) was amplified from cDNA and integrated into yeast expression vector pJR1138 (Yalovsky et al., 1997, Mol. Cell. Biol. 17: 1986-1994). The primers Cg1-6GBPEcoRI-Fw and Cg1-6GBPXhoI-Rv have been used to amplify the cDNA of the β-1,6-glucan-binding protein cDNA, which was cloned into the EcoRI and XhoI sites of pJR1138. These primers, and others mentioned here, are listed in Supporting Table 1. The empty vector and the vector containing the β-1,6-glucan-binding protein were transformed into S. cerevisiae strains Y00000, using the lithium acetate procedure (Becker and Lundblad, 2001). Yeast cells were grown on YSCM agar lacking leucine.

[0294] DNA Extraction and Genomic DNA Gel Blot Analysis

[0295] Extraction of genomic DNA and Southern blot analyses were performed as described (Werner et al., 2007). To analyze transformants for the number of integrations of the RNAi construct, 10 mg of DNA digested with the appropriate restriction endonuclease were used. The 511-bp alkali-labile DIG-dUTP-labeled probe (Roche Diagnostics, Mannheim, Germany) specific for the nourseothricin acetyl transferase gene (Nat-1) was amplified from plasmid pNRI, using primers NatR probe-Fw and NatR probe-Rv. To analyze transformants for the correct integration of a single copy of the KRES5:mCherry and KRE6:mCherry cassette into genomic DNA of WT and RNAi strains, Southern blots were hybridized with a 500-bp DIG-dUTP-labeled hygromycin phosphotransferase (Nat^{R})-specific probe, amplified from the KRES5:mCherry and KRE6:mCherry construct, using primers NatR probe-fw and NatR probe-rv.

[0296] Quantitative PCR and RT-PCR

[0297] To quantify fungal development, qPCR was performed as described (Oliveira-Garcia and Deising, 2013), with 100 nM of each primer (CgITS2-q1, CgITS2-q2). All values are standardized to the average threshold cycle value obtained with DNA extracted from non-wounded leaves inoculated with the C. graminicola wild-type strain at 0 HAI.

[0298] Quantitative RT-PCR (RT-qPCR) was performed with 100 ng of total RNA pretreated with RQ1 RNase-free DNase (Promega, Madison, Wis., USA) as described (Oliveira-Garcia and Deising, 2013). Primers used are given in Supporting Table 1 Online). Melting curve and agarose gel analyses confirmed amplification of a single product. Transcript abundance was calculated and normalized as described (Gutjahr et al., 2008, Plant Cell 20: 2989-3005), using α-actin and histone H3 for C. graminicola and histone H2B and β-tubulin for Z. mays. CT values of three independent replicates were used to calculate mean values and standard deviations.

[0299] Microscopy and Imaging

[0300] Bright-field, differential interference contrast (DIC) microscopy and fluorescence microscopy was performed using a Nikon Eclipse 600 or a Nikon Eclipse 90i confocal laser scanning microscope (Nikon, Dusseldorf, Germany). For fluorescence microscopy, a Plan Apo 60/1.4 oil lens and the following settings were used: Excitation wavelength, 488 nm; laser light transmittance, 25% (ND4 in, ND8 out); pinhole diameter, 30 mm.

[0301] To analyze β-1,6-glucan contents of cell walls, infected maize leaves were harvested at 0, 12, 24, 48, and 72 HAI and stained with β-1,6-GBP:YFP for 20 min, 23° C. To analyze β-1,3-glucan contents of cell walls, infected maize leaves were harvested at 0, 12, 24, 48, and 72 HAI and stained with Aniline Blue Fluorocrome (Biosupplies Australia Pty Ltd, Parkville Victoria, Australia) as described (Oliveira-Garcia and Deising, 2013). To exclude that differential Aniline Blue Fluorocrome staining was due to masking of β-1,3-glucan by apposition of α-glucan, specimens were incubated at 60° C. or autoclaved in 0.1 N NaOH for 20 min and subsequently stained with Aniline Blue Fluorocrome.

[0302] Quantitative fluorescence levels of KRES5:mCherry and KRE6:mCherry expressing transformants of C. graminicola were evaluated at 0, 12, 24, and 72 HAI, using a Zeiss Observer Z1 inverted microscope equipped with a Plan Apochromat 63x/1.40 oil immersion objective and an AxioCam MRm camera. Epi-illumination analyses employed filter set 49 for Aniline Blue Fluorocrome and filter set 38HE for mCherry. Image acquisition and analysis were performed by using Zeiss AxioVision 4.8.2 (06-2010) software with the Physiology module (all from Carl Zeiss, Oberkochen, Germany).

[0303] Cross sections of biotrophic and necrotrophic infection hyphae (20 pm) were made, using Plaque GP-low-melting agarose (Biozym, Hessisch Oldendorf, Germany)-imbedded specimens and a Carl Zeiss microtome (Hyrax V50; Carl Zeiss, Jena, Germany).

[0304] Other Methods

[0305] Appressorial turgor pressure was measured as incipient cytorrhizis, using polyethylene glycol 6000 (PEG 6000; 400 mg/mL) as described (Oliveira-Garcia and Deising, 2013).

[0306] Hyphal penetration rates was measured on PDA, using different agar concentrations as described (Brush and Money, 1999).

[0307] To measure conidiation, Petri dishes (0 9 cm) with 14 d old fungal cultures grown on OMA were washed on a rotary shaker with 10 mL 0.01% (v/v) Tween 20 for 10 min to yield homogenous conidial suspensions. Conidia were counted in a Thoma chamber.

[0308] Molecular Phylogenetic Analyses

[0309] Multiple sequence alignments were done using ClustalW (http://embnet.vital-it.ch/software/ClustalW.html; (Larkin et al., 2007, Clustal W and Clustal X version 2.0. Bioinformatics 23: 2947-2948). Phylogenetic dendograms were constructed using MEGA 5 (www.megasoftware.net; (Tamura et al., 2011, Mol. Biol. Evol., 28: 2731-2739), with the minimum evolution algorithms using 1000 bootstrap replications. Sequences of all fungal KRE genes were obtained from the database of the National Center for Biotechnology Information (http://www.ncbi.nlm.nih.gov/).

[0310] Statistics

[0311] Calculations (t-test, analysis of variance) were performed with the software XLSTAT version 2009.4.02 (Addinsoft, Witzenhausen, Germany).

TABLE 1
PCR-primers (SEQ ID NOs: 243-365) (in the
order of the listing of the primers)

| | | Refer- |
|---|---|---|
| Primer | Sequence [5′→3′] | ence |
| CgKRE5 | CCAGCGGCCGCATGGGCCTTGCCCT- | This |
| NotI-Fw | GACGCTGT | study |
| CgKRE5 | CAGCGGCCGCCTATAGCTCATCTATGACAT- | This |
| NotI-Rv | GCGTATT | study |
| CgKRE6S | AAAGGCCATTACGGCCATGGATCAAGAC- | This |
| filA-Fw | CAGGGCTACTAC* | study |
| CgKRE6S | AAAGGCCGCCTCGGCCTTACAACTCTTCA- | This |
| filB-Rv | TCGCCGTCAC | study |
| CgPKRE6- | TCGGCAGCTGAACGGAAAG | This |
| Fw | | study |
| CgP | GTGCAACTGACAGTCGTACAGG- | This |
| KRE65′- | TATCGAGTGGCTTGGAAC* | study |
| flank-Rv | | |
| CgTKRE | GTCTGGAGTCTCACTAGCTTGCGCGGAATT- | This |
| 63′- | GGTTCACAACGG | study |
| flank-Fw | | |
| CgTKRE6- | CCTCCGTGCAGCATGTAATC | This |
| Rv | | study |
| CgPKRE6 | AGTGCCTTGAGGGCACGTTG | This |
| nest-Fw | | study |
| CgTKRE6 | GCAACCTCGTTCGTTAGTG | This |
| nest-Rv | | study |
| Cg KRE6 | TTGGGAGGTGGCTGAACATC | This |
| test-Fw | | study |
| Cg KRE6 | ACACGTGCTCGAAGCACTAGG | This |
| test-Rv | | study |
| CgPKRE5- | TGGTCTGCTCTCACCTCTTG | This |
| Fw | | study |
| CgP | GTGCAACTGACAGTCG- | This |
| KRE55′- | TACAAAGGGCTGTCCTCCAATTTC* | study |
| flank-Rv | | |
| CgT | GTCTGGAGTCTCACTAGCTT- | This |
| KRE53′- | CTAGTCGGTCTGGCTTCTTG | study |
| flank-Fw | | |
| CgT | CGGGAAAGATGCAAGTCCTC | This |
| KRE5-Rv | | study |
| Gen1pII | TGTACGACTGTCAGTTGCACAGCGCGTT- | This |
| 99-Fw | GTTGGATTAAG | study |
| Gen1pII | AAGCTAGTGAGACTCCAGACCTCA- | This |
| 99-Rv | GAAGAACTCGTCAAGAAG | study |
| Nourse1 | TGACCGGTGCCTGGATCTTCCTATAGAATC | Oliveira- |
| pNR1-Fw | | Garcia |
| | | & |
| | | Deising, |
| | | 2013. |
| Nourse2 | GGTCGGCATCTACTCTATTCCTTTGCCCTC | Oliveira- |
| pNR1-Rv | | Garcia |
| | | & |
| | | Deising, |
| | | 2013. |
| CgPKRE5 | CGAACTGTATGCTGGGTGAG | This |
| nest-Fw | | study |
| CgTKRE5 | GTCAGGACACGAACGACAAG | This |
| nest-Rv | | study |
| Cg KRE5 | TCCAGAAGCGGCCTGCTTAC | This |
| test-Fw | | study |
| Cg KRE5 | CGTCACATTGCCTGCTGAAC | This |
| test-Rv | | study |
| RNAi | AAACTCGAGTCATGTCGGTGCGGACAATC | This |
| (KRE5)- | | study |
| Fw | | |
| RNAi | AAAAAGCTTTCTTTCAAGGGCCTGCCCTC | This |
| (KRE5)- | | study |
| Rv | | |
| RNAi | AAAAGGCCTTCTTTCAAGGGCCTGCCCTC | This |
| (KRE5) | | study |
| i-Fw | | |
| RNAi | AAAGGGCCCTCATGTCGGTGCGGACAATC | This |
| (KRE5) | | study |
| i-Rv | | |
| RNAi | TTTCCCGGGTTACAACTCTTCATCGCCGT- | This |
| (KRE6) | CAC | study |
| SmaI-Fw | | |
| RNAi | AAACCCGGGAGATGACCACCGCAGACAATG | This |
| (KRE6) | | study |
| SmaI-Rv | | |
| GenR | AGCACGTACTCGGATGGAAG | This |
| probe-Fw | | study |
| GenR | CCTCAGAAGAACTCGTCAAGAAG | This |
| probe-Rv | | study |
| HyhR | TGAACTCACCGCGACGTCTG | Oliveira- |
| probe-Fw | | Garcia |
| | | & |
| | | Deising, |
| | | 2013 |
| HyhR | GAGCTGATGCTTTGGGCCGA | Oliveira- |
| probe-Rv | | Garcia |
| | | & |
| | | Deising, |
| | | 2013 |
| NatR | CTCTTGACGACACGGCTTAC | Oliveira- |
| probe-Fw | | Garcia |
| | | & |
| | | Deising, |
| | | 2013 |
| NatR | GGCAGGGCATGCTCATGTAG | Oliveira- |
| probe-Rv | | Garcia |
| | | & |
| | | Deising, |
| | | 2013 |
| CgGLS1 | GCTACTATGACGAATCGGGCTAT | Oliveira- |
| qRT-Fw | | Garcia |
| | | & |
| | | Deising, |
| | | 2013 |
| CgGLS1 | GCCATTGTTGCCGTTGTTG | Oliveira- |
| qRT-Rv | | Garcia |
| | | & |
| | | Deising, |
| | | 2013 |
| CgACTqR | TCCTACGAGCTTCCTGACGG | Krijger |
| T-F1 | | et al., |
| | | 2008. |
| CgACTqR | CCGCTCTCAAGACCAAGGAC | Krijger |
| T-R1 | | et al., |
| | | 2008. |
| CgH3- | CGAGATCCGTCGCTACCAGA | Krijger |
| qRT.F1 | | et al., |
| | | 2008. |
| CgH3- | GGAGGTCGGACTTGAAGTCCT | Krijger |
| qRT.R1 | | et al., |
| | | 2008. |
| CgITS2- | TGAACGCGAGCTAACTTGACA | Behr |
| q1 | | et al., |
| | | 2009. |
| CgITS2- | GGGCATCGAAGATGGAGGA | Behr |
| q2 | | et al., |
| | | 2009. |
| CgTKRE5 | TCTGCGGCCGCTCAGAAAGAGCCGGTAG- | This |
| NotI-Rv | AAG | study |
| CgTKRE6 | TCTCCCGGGTCAGAAAGAGCCGGTAGAAG | This |
| SmaI-Fw | | study |
| CgTKRE6 | TTTCCCGGGCAGGGCCTTACCTCGATACC | This |
| SmaI-Rv | | study |
| ZmTerp | CGTGGACACATGACGGAAAGAG | Oliveira- |
| S10_RT- | | Garcia |
| Fw | | & |
| | | Deising, |
| | | 2013. |
| ZmTerp | CTCGCTGATCTCATTCTCGTAGTG | Oliveira- |
| S10_RT- | | Garcia |
| Rv | | & |
| | | Deising, |
| | | 2013. |
| ZmTerp | TGTACAATGCGGCTCACATGGC | Oliveira- |
| S07_RT- | | Garcia |
| Fw | | & |
| | | Deising, |
| | | 2013. |
| ZmTerp | CTGACCTCGCCTTTGCTGATG | Oliveira- |
| S07_RT- | | Garcia |
| Rv | | & |
| | | Deising, |
| | | 2013. |
| ZmTerp | GATGCTGCGTCAGCGTCAGAAG | Oliveira- |
| S03_RT- | | Garcia |
| Fw | | & |
| | | Deising, |
| | | 2013. |
| ZmTerp | TCGAAGAAGTGGTCGATGCAGAG | Oliveira- |
| S03_RT- | | Garcia |
| Rv | | & |
| | | Deising, |
| | | 2013. |
| ZmTerp | GTCCGTACTTTGGCGGCATCATC | Oliveira- |
| RS02_T- | | Garcia |
| Fw | | & |
| | | Deising, |
| | | 2013. |
| ZmTerp | TCCGTTTGACGTCCGTCGTCAG | Oliveira- |
| S02_RT- | | Garcia |
| Rv | | & |
| | | Deising, |
| | | 2013. |
| ZmGluc | AGGCGCCATTGCTCAGACAGATAG | Oliveira- |
| 079_RT- | | Garcia |
| Fw | | & |
| | | Deising, |
| | | 2013. |
| ZmGluc | AGCCTCGAGCCATTCCGTGAAG | Oliveira- |
| 079_RT- | | Garcia |
| Rv | | & |
| | | Deising, |
| | | 2013. |
| ZmGluc | GTGCTCGCATAGTCGCATCGTTAG | Oliveira- |
| 262_RT- | | Garcia |
| Fw | | & |
| | | Deising, |
| | | 2013. |
| ZmGluc | CAGCAGCGCCTTCATGGTTGTC | Oliveira- |
| 262_RT- | | Garcia |
| Rv | | & |
| | | Deising, |
| | | 2013. |
| ZmGluc | CTCTACTAGAGGGCGGGTATAGAG | Oliveira- |
| P23_RT- | | Garcia |
| Fw | | & |
| | | Deising, |
| | | 2013. |
| ZmGluc | GCCGACAGAAAGACAGGAGCAAAC | Oliveira- |
| P23_RT- | | Garcia |
| Rv | | & |
| | | Deising, |
| | | 2013. |
| ZmGluc | CAGTGGACGCAGCAGCACATC | Oliveira- |
| P15_RT- | | Garcia |
| Fw | | & |
| | | Deising, |
| | | 2013. |
| ZmGluc | GGTCCGCGTGGTTCTTGAACTC | Oliveira- |
| P15_RT- | | Garcia |
| Rv | | & |
| | | Deising, |
| | | 2013. |
| ZmGluc | GCGGCGTACAACAACAACGTG | Oliveira- |
| 561_RT- | | Garcia |
| Fw | | & |
| | | Deising, |
| | | 2013. |
| ZmGluc | TGAACATGGCGAACAGGTAGGTC | Oliveira- |
| 561_RT- | | Garcia |
| Rv | | & |
| | | Deising, |
| | | 2013. |
| ZmGluc | CTGCAGAAGACGCTGGACTAC | Oliveira- |
| 714_RT- | | Garcia |
| Fw | | & |
| | | Deising, |
| | | 2013. |
| ZmGluc | GTAGGAGCAGTGGGCCTTGAC | Oliveira- |
| 714_RT- | | Garcia |
| Rv | | & |
| | | Deising, |
| | | 2013. |
| ZmGluc | CTGTTCGAGTTCGCCGACAAG | Oliveira- |
| 678_RT- | | Garcia |
| Fw | | & |
| | | Deising, |
| | | 2013. |
| ZmGluc | TCGACGACGTAGTCCAGGTACTC | Oliveira- |
| 678_RT- | | Garcia |
| Rv | | & |
| | | Deising, |
| | | 2013. |
| ZmGluc | CTGCCCACCAACTCCTTCTTC | Oliveira- |
| 782_RT- | | Garcia |
| Fw | | & |
| | | Deising, |
| | | 2013. |
| ZmGluc | GGTGGATGTACTCGGGCATGTC | Oliveira- |
| 782_RT- | | Garcia |
| Rv | | & |
| | | Deising, |
| | | 2013. |
| ZmGluc | CTTCCCGGCGAAGCCGATG | Oliveira- |
| 837_RT- | | Garcia |
| Fw | | & |
| | | Deising, |
| | | 2013. |
| ZmGluc | CAACTACAAGTACGCGCCGTTC | Oliveira- |
| 837_RT- | | Garcia |
| Rv | | & |
| | | Deising, |
| | | 2013. |
| ZmChit | GTCACCGGCTCCTTCTTCAAC | Oliveira- |
| 633_ | | Garcia |
| RT-Fw | | & |
| | | Deising, |
| | | 2013. |
| ZmChit | GCTCCGGGTGTAGAAGTTCTTG | Oliveira- |
| 633_ | | Garcia |
| RT-Rv | | & |
| | | Deising, |
| | | 2013. |
| ZmPero | CGTCCCATCCTACGATCCAAAG | Oliveira- |
| x182_ | | Garcia |
| RT-Fw | | & |
| | | Deising, |
| | | 2013. |
| ZmPero | TCTCGACAGCCTCGCTGTACTC | Oliveira- |
| x182_ | | Garcia |
| RT-Rv | | & |
| | | Deising, |
| | | 2013. |
| ZmPero | TCCGCCTCCACTTCCATGACTG | Oliveira- |
| x648_ | | Garcia |
| RT-Fw | | & |
| | | Deising, |
| | | 2013. |
| ZmPero | ATCGCGTCGATCACCTCGTACC | Oliveira- |
| x648_ | | Garcia |
| RT-Rv | | & |
| | | Deising, |
| | | 2013. |
| ZmPero | CGCAGCTCTCGGCAGATTTCTAC | Oliveira- |
| x816_ | | Garcia |
| RT-Fw | | & |
| | | Deising, |
| | | 2013. |
| ZmPero | TCGACGACGCCCAAGATGATCTTC | Oliveira- |
| x816_ | | Garcia |
| RT-Rv | | & |
| | | Deising, |
| | | 2013. |
| ZmPero | AGTTGGCTACCAGCCCTCTGTATG | Oliveira- |
| x871_ | | Garcia |
| RT-Fw | | & |
| | | Deising, |
| | | 2013. |
| ZmPero | GACCTGTGCTGCGTTGTTATAC | Oliveira- |
| x871_ | | Garcia |
| RT-Rv | | & |
| | | Deising, |
| | | 2013. |
| ZmPero | TGGTCAAGTACCACGTCGCCAAG | Oliveira- |
| x954_ | | Garcia |
| RT-Fw | | & |
| | | Deising, |
| | | 2013. |
| ZmPero | GACGAAGCAGTCGTGGAAGATGAG | Oliveira- |
| x954_ | | Garcia |
| RT-Rv | | & |
| | | Deising, |
| | | 2013. |
| ZmPero | GAGATGACGACCGCTCCCATTG | Oliveira- |
| x365_ | | Garcia |
| RT-Fw | | & |
| | | Deising, |
| | | 2013. |
| ZmPero | AGCGGGCTTATGTTGCCCATC | Oliveira- |
| x365_ | | Garcia |
| RT-Rv | | & |
| | | Deising, |
| | | 2013. |
| ZmPero | TTCCTGATGCCACCAAGGGTTC | Oliveira- |
| x346_ | | Garcia |
| RT-Fw | | & |
| | | Deising, |
| | | 2013. |
| ZmPero | GAGGGCAACGATGTCCTGATCAC | Oliveira- |
| x346_ | | Garcia |
| RT-Rv | | & |
| | | Deising, |
| | | 2013. |
| ZmPero | AGGGAGTACGTCCACCGTATTG | Oliveira- |
| x109_ | | Garcia |
| RT-Fw | | & |
| | | Deising, |
| | | 2013. |
| ZmPero | TGGCCATCTTGGTCATGGACTC | Oliveira- |
| x109_ | | Garcia |
| RT-Rv | | & |
| | | Deising, |
| | | 2013. |
| ZmPero | ACACAAGAAGCTGTCAGAGCTAGG | Oliveira- |
| x456_ | | Garcia |
| RT-Fw | | & |
| | | Deising, |
| | | 2013. |
| ZmPero | CATGCGACAACTGCGGTAGCAAC | Oliveira- |
| x456_ | | Garcia |
| RT-Rv | | & |
| | | Deising, |
| | | 2013. |
| ZmPero | CGGTGTTCGAGGTGATGGGCTAC | Oliveira- |
| x731_ | | Garcia |
| RT-Fw | | & |
| | | Deising, |
| | | 2013. |
| ZmPero | GCAGCAGTATGAGCGCCATGTTG | Oliveira- |
| x731_ | | Garcia |
| RT-Rv | | & |
| | | Deising, |
| | | 2013. |
| ZmSTKi | GCACGTTCTCCTCGTCAAACTG | Oliveira- |
| n276_ | | Garcia |
| RT-Fw | | & |
| | | Deising, |
| | | 2013. |
| ZmSTKi | CAGCCAGCCGAAGCTGATTATG | Oliveira- |
| n276_ | | Garcia |
| RT-Rv | | & |
| | | Deising, |
| | | 2013. |
| ZmUGT | AGAAAGCAAGGCGTGGCTGGAC | Oliveira- |
| 079_ | | Garcia |
| RT-Fw | | & |
| | | Deising, |
| | | 2013. |
| ZmUGT | TGCCGTAGAGGCCATCGGCTATC | Oliveira- |
| 079_ | | Garcia |
| RT-Rv | | & |
| | | Deising, |
| | | 2013. |
| ZmShi | TCAGGAATCCGGTGATCCTTATGC | Oliveira- |
| k590_ | | Garcia |
| RT-Fw | | & |
| | | Deising, |
| | | 2013. |
| ZmShi | CTCTGGCATCAGCATTAGCATACG | Oliveira- |
| k590_ | | Garcia |
| RT-Rv | | & |
| | | Deising, |
| | | 2013. |
| ZmGer | AGGCCATCGCCATGACGCTCTTC | Oliveira- |
| mLP1_ | | Garcia |
| RT-Fw | | & |
| | | Deising, |
| | | 2013. |
| ZmGer | TGGGTGCGAAGTTTGCCTTGATG | Oliveira- |
| mLP1_ | | Garcia |
| RT-Rv | | & |
| | | Deising, |
| | | 2013. |
| ZmSTK | GTCCCTTCGTTGCTGTGTCTTCTG | Oliveira- |
| in99_ | | Garcia |
| RT-Fw | | & |
| | | Deising, |
| | | 2013. |
| ZmSTK | GAATTGTCGCATCGCACCAGTTTG | Oliveira- |
| in99_ | | Garcia |
| RT-Rv | | & |
| | | Deising, |
| | | 2013. |
| ZmSTK | TATCGTCCACGTCACGACCGAATG | Oliveira- |
| in74_ | | Garcia |
| RT-Fw | | & |
| | | Deising, |
| | | 2013. |
| ZmSTK | CGGACCTGCCTACCTTTGCTAAC | Oliveira- |
| in74_ | | Garcia |
| RT-Rv | | & |
| | | Deising, |
| | | 2013. |
| ZmSTK | GGCGGTGTTCCAGTTCCAGTTCC | Oliveira- |
| in50_ | | Garcia |
| RT-Fw | | & |
| | | Deising, |
| | | 2013. |
| ZmSTK | CTAGCTGACAGGAGAGCGCATGAC | Oliveira- |
| in50_ | | Garcia |
| RT-Rv | | & |
| | | Deising, |
| | | 2013. |
| ZmSTK | CCTGTTTATCGGTCGGCTTCATGG | Oliveira- |
| in77_ | | Garcia |
| RT-Fw | | & |
| | | Deising, |
| | | 2013. |
| ZmSTK | AATGTTCGACTCGGCGATCCTATG | Oliveira- |
| in77_ | | Garcia |
| RT-Rv | | & |
| | | Deising, |
| | | 2013. |
| ZmTFZ | CAAGAGGCTGTGCCAGGAGATCG | Oliveira- |
| nfing | | Garcia |
| 653_ | | & |
| RT-Fw | | Deising, |
| | | 2013. |
| ZmTFZ | CGTCGGTGAACTTGGGATCCTTGG | Oliveira- |
| nfing | | Garcia |
| 653_ | | & |
| RT-Rv | | Deising, |
| | | 2013. |
| ZmWRKY | GGGAGATTATTGTGACGCCTGAG | Oliveira- |
| 62/ | | Garcia |
| 149_ | | & |
| RT-Fw | | Deising, |
| | | 2013. |
| ZmWRKY | CAGCTTCTCGACGAACTCGGAATC | Oliveira- |
| 62/ | | Garcia |
| 149_ | | & |
| RT-Rv | | Deising, |
| | | 2013. |
| ZmCellu | TGGGCCTTCACCTTCGTCATCAC | Oliveira- |
| Synt145_ | | Garcia |
| RT-Fw | | & |
| | | Deising, |
| | | 2013. |
| ZmCellu | GCCAGAGGTAGTAGCCGTCGAAC | Oliveira- |
| Synt145_ | | Garcia |
| RT-Rv | | & |
| | | Deising, |
| | | 2013. |
| ZmCellu | CATCCTGCTGGCCTCGATCTTCTC | Oliveira- |
| Synt8/ | | Garcia |
| 631_ | | & |
| RT-Fw | | Deising, |
| | | 2013. |
| ZmCellu | CAGTTGCAGTCCAGGCCACACTC | Oliveira- |
| Synt8/ | | Garcia |
| 631_ | | & |
| RT-Rv | | Deising, |
| | | 2013. |
| ZmCellu | TCTCGAAGCTGACAGGGCCAACG | Oliveira- |
| Synt567_ | | Garcia |
| RT-Fw | | & |
| | | Deising, |
| | | 2013. |
| ZmCellu | AAGGAACAGCCCAATGAACACCTC | Oliveira- |
| Synt567_ | | Garcia |
| RT-Rv | | & |
| | | Deising, |
| | | 2013. |
| ZmCalmo | CGCGGTGCTGTCGTCGCTGGG | Oliveira- |
| dul673_ | | Garcia |
| RT-Fw | | & |
| | | Deising, |
| | | 2013. |
| ZmCalmo | ATCTGGCGGAACTCGCGGAAGTC | Oliveira- |
| dul673_ | | Garcia |
| RT-Rv | | & |
| | | Deising, |
| | | 2013. |

*sequence overlaps and restriction sites are underlined

[0312] Cloning of the Plant Transformation Vector p7U-ubi RGA2intronII_HIGS_GLRG_05611 into Corn

[0313] In order to transform a HIGS construct directed against the Colletotrichum graminicola gene Kre5 into corn the plant transformation vector p7U-ubi_RGA2intronII_HIGS_GLRG_05611 (FIG. 22) was created. The HIGS cassette of the vector was composed of a hairpin construct which contained a 500 bp fragment of the Kre5 gene in sense orientation and the same DNA fragment in antisense orientation. The Kre5 fragments were separated by the RGA2intronII. After transcription of the hairpin construct by the corn ubiquitin promoter and splicing of the intron a double stranded Kre5 RNA molecule will be formed in the plant which is suitable for the generation of siRNAs.

[0314] In a first step the coding region of the Kre5 gene (GLRG_05611) was amplified from position 3680-4135 by PCR. PCR was done using the primers S2264 (CTGGATCCTGGTGAC-CTTCAAGTGGCCTCA) (SEQ ID NO: 366) and S2265 (GCCCCGGGGACTGTGAATGGG-GATCT) (SEQ ID NO: 367) which contained an additional BamHI (S2264) and XmaI (S2265) site for subcloning of the PCR fragment. PCR was done using genomic DNA of C. graminicola as template and the Phusion PCR polymerase for amplification (annealing temperature 55° C.).

[0315] The S2264-S2265 PCR product was purified by agarose gel electrophoresis, digested with the restriction enzymes BamHI and XmaI and subcloned into the vector pGGubi_RGA2intronII (FIG. 23), which was also treated with BamHI and XmaI. The resulting vector pGGubi_RGA2intronII_HIGS_GLRG_05611_sense contained the Kre5 gene in sense orientation upstream of the RGA2 intron. Cloning was done in the E. coli strain NEB5α.

[0316] In a second step the coding region of the Kre5 gene (GLRG_05611) was amplified from position 3680-4135 by PCR using the primers S2266 (CTCGATCGTGGTGAC-CTTCAAGTGGCCTCA) (SEQ ID NO: 368) and S2267 (GCAAGCTTGACTGTGAATGGGGATCT) (SEQ ID NO: 369) which contained an additional PvuI (S2266) and HindIII site (S2267). The S2266-S2267 PCR product was also purified by agarose gel electrophoresis, digested with the restriction enzymes PvuI and HindIII and subcloned as Kre5 antisense fragment into the vector pGGubi_RGA2intronII-HIGS-GLRG_05611_sense (FIG. 24), which was also pretreated with PvuI and HindIII. The resulting vector pGGubi_RGA2intronII_HIGS_GLRG_05611 (FIG. 24) contained the Kre5 gene in sense orientation upstream of the RGA2 intron and the Kre5 gene in antisense orientation downstream of the RGA2 intron. Cloning was done in the E. coli strain NEB5α.

[0317] In a third step the Kre5 hairpin cassette under the expression control of the corn ubiquitin promoter and the nopaline synthase gene terminator was subcloned as a Sfil fragment into the Sfil site of the binary vector p7U. The resulting vector p7U-ubi_RGA2intronII_HIGS_GLRG_05611 (FIG. 22) was transformed into the Agrobacterium strain GV2260 and used for the generation of transgenic corn plants.

[0318] Transformation of Corn

[0319] Corn transformation was done as described by Ishida et al. 2007 (Nature Protocols 2(7):1614-21). In brief immature embryos of the corn inbred line A188 were transformed by Agrobacterium tumefaciens mediated transformation using LS medium and the selection agent phosphinothricin.

[0320] Cloning of the Transcriptional Silencing Test Vector pABM Ubiluci GLRG 05611

[0321] In order to analyze the transcriptional silencing activity of the transformed corn lines against the C. graminicola Kre5 (GLRG_05611) gene the HIGS test vector pABM_ubiluci_GLRG_05611 (FIG. 25) was constructed. In this vector the Kre5 HIGS target sequence is located in the transcribed non-translated 3′-region of the luciferase gene. The transcription of this construct will result in a hybrid transcript encoding a luciferase and a non-translated partial Kre5 fragment. The expression of the reporter gene is sensitive to the presence of siRNAs which are directed against the Kre5 DNA fragment of the reporter gene construct. RNA degradation initiated by the Kre5 siRNAs will finally continue into the luciferase coding region by induction of secondary siRNAs targeting the sequences upstream of the Kre5 target sequence.

[0322] The coding region of the Kre5 gene from position 3680-4135 was amplified with the primers S2473 (CTAAGCTTTGGTGACCTTCAAGTGGCCTCA) (SEQ ID NO: 370) and S2247 (CCGTCGACGACTGTGAATGGGGATCT) (SEQ ID NO: 371), which included a HindIII (S2473) and a SalI (S2247) recognition site. The S2473-S2247 PCR product was inserted as a HindIII-SalI fragment into the corresponding recognition sites of the vector pABM_ubiluci to create pABM_ubiluci_GLRG_05611 (FIG. 25).

[0323] Detection of transcriptional silencing activity in HIGS corn lines

[0324] In order to detect transcriptional silencing activity in HIGS corn lines and to preselect promising HIGS lines the vector pABM_ubiluci_GLRG_05611 was transiently expressed with the normalization vector p70S-Ruc, a fusion between the doubled 35S-promoter and the coding sequence of the Renilla reniformis luciferase (Schmidt et al., 2004, Plant Mol. Biol., 55: 835-852). The transient biolistic experiments were done as described (Schmidt et. al 2004) by using the PDS-1000/He system (Biorad). The vector pABM_ubiluci_GLRG_05611 were mixed with the internal standard p70S-Ruc in a ratio of 1:1 (w:w). DNA was precipitated onto gold microcarriers (Au Typ 200-03; Heraeus, Hanau, Germany).

[0325] Leaf stripes of T0 corn lines were put on MS+0.4 M mannitol agar plates and bombarded with the DNA coated microcarriers, using a pressure of 1550 psi and a distance between the stopping screen and the leaf sample of 12 cm in a vacuum of 28.5 inches Hg. After bombardment, leaf samples were incubated for 16 h at 25° C. in the light. Activities of both luciferases were quantified using the dual luciferase assay (Promega). Relative reportergene activity was calculated as following:

(Photinus value_{(reportergene construct)}−Photinus value_{(without DNA)}/Renilla value_{(normalization construct)}−Renilla value_{(without DNA)})×100. The given mean was the average of 6 replicates.

[0326] Cloning and Transfer of the Plant Transformation Vector p6U-355-MgKRE5-355 into Wheat

[0327] In order to transform a HIGS construct against the Mycoshaerella graminicola (Zymoseptoria tritici) gene KRE5 into wheat the plant transformation vector p6U-35S-MgKRE5-35S (FIG. 26) was created. In a first step a 401 bp large fragment of the coding region of the KRES gene was amplified by PCR from position 3521-3921. PCR was done with the Phusion PCR polymerase for amplification according standard protocols using the primers S2237 (CTACTAGTCATGGCAACAGCGTACGGTTTC) and S2238 (ATGTCGACGTAATTCTGCCGCAGCCGATCAC) which contained an additional SpeI (S2237) and SalI (S2238) site for subcloning of the PCR fragment. Cloning was done in the E. coli strain NEB5a and the binary vector was transformed into the Agrobacterium strain GV2260 for wheat transformation. The KRE5 fragment of p6U-35S-MgKRE5-35S is inserted between two inverse oriented 35S promoters. The orientation of the 35S promoters allows the generation of double-stranded RNA from the KRE5 gene which is a substrate for the Dicer enzyme of wheat.

[0328] Wheat transformation was done as described by Ishida et al., 2015 (Methods Mol Biol. 2015; 1223:189-98) using immature embryos of healthy plants of the spring wheat cultivar Taifun grown in a well-conditioned greenhouse. T1 seeds of the primary wheat transformants were generated under greenhouse conditions.

[0329] Enhanced Septoria Blotch Resistance of a Wheat HIGS_{KRE5} Line

[0330] using the PDS-1000/He system (Biorad). The vector pABM_ubiluci_GLRG_05611 were mixed with the internal standard p70S-Ruc in a ratio of 1:1 (w:w). DNA was precipitated onto gold microcarriers (Au Typ 200-03; Heraeus, Hanau, Germany).

[0331] Leaf stripes of T0 corn lines were put on MS+0.4 M mannitol agar plates and bombarded with the DNA coated microcarriers, using a pressure of 1550 psi and a distance between the stopping screen and the leaf sample of 12 cm in a vacuum of 28.5 inches Hg. After bombardment, leaf samples were incubated for 16 h at 25° C. in the light. Activities of both luciferases were quantified using the dual luciferase assay (Promega). Relative reportergene activity was calculated as following:

(Photinus value_{(reportergene construct)}−Photinus value_{(without DNA)}/Renilla value_{(normalization construct)}−Renilla value_{(without DNA)})×100. The given mean was the average of 6 replicates.

[0332] Cloning and Transfer of the Plant Transformation Vector p6U-355-MgKRE5-355 into Wheat

[0333] In order to transform a HIGS construct against the Mycoshaerella graminicola (Zymoseptoria tritici) gene KRE5 into wheat the plant transformation vector p6U-35S-MgKRE5-35S (FIG. 26 top) was created. In a first step a 401 bp large fragment of the coding region of the KRES gene was amplified by PCR from position 3521-3921. PCR was done with the Phusion PCR polymerase for amplification according standard protocols using the primers S2237 (CTACTAGTCATGGCAACAGCGTACGGTTTC) and S2238 (ATGTCGACGTAATTCTGCCGCAGCCGATCAC) which contained an additional SpeI (S2237) and SalI (S2238) site for subcloning of the PCR fragment. Cloning was done in the E. coli strain NEB5α and the binary vector was transformed into the Agrobacterium strain GV2260 for wheat transformation. The KRE5 fragment of p6U-35S-MgKRE5-35S is inserted between two inverse oriented 35S promoters. The orientation of the 35S promoters allows the generation of double-stranded RNA from the KRE5 gene which is a substrate for the Dicer enzyme of wheat.

[0334] Wheat transformation was done as described by Ishida et al., 2015 (Methods Mol Biol. 2015; 1223:189-98) using immature embryos of healthy plants of the spring wheat cultivar Taifun grown in a well-conditioned greenhouse. T1 seeds of the primary wheat transformants were generated under greenhouse conditions.

[0335] Enhanced Septoria blotch Resistance of a Wheat HIGS_{KRE5} Line

[0336] T1 seeds of wheat HIGS_{KRE5} lines were planted in the greenhouse and transgenic homozygous, transgenic heterozygous and non-transgenic lines were identified by qPCR (TaqMan assay). In the case of a single T-DNA integration a 1:2:1 segregation pattern according the mendelian rules was observed.

[0337] Beside the cultivar Taifun, which was used for transformation, the non-transgenic progenitors of the HIGS_{KRE5} lines were collected and included as a non-transgenic segregant control into the resistance assay. In addition the German spring wheat lines Aurum and Passat were included as references. The heterozygous and homozygous T1 plants of each HIGS_{KRE5} lines were combined for the Septoria blotch assay. The resistance assay was done with twelve transgenic plants of each line in a randomized design in the greenhouse. After the appearance of the flag leaf the plants were spray inoculated at two times with 50.000 spores/ml of Mycosphaerealla graminicola (Zymoseptoria tritici). A disease scoring was made for the F (flag) and the F-1 leaf. The appearance of symptoms (0-100%) was scored 21, 26, 31 and 35 days after inoculation. An area under disease progression curve (AUDPC) was calculated until 35 days after inoculation.

[0338] The HIGS_{KRE5} line WA-601-T-035 revealed an enhanced Septoria blotch resistance in the assay (FIG. 26 below). The transformation genotype Taifun and the non-transgenic segregants showed an AUDPC value of 316 and 330, respectively. The AUDPC value of the HIGS_{KRE5} line WA-601-T-035 was only 237. This value was also below the AUDPC value of the the two reference lines, Aurum and Passat, which were included into the assay.

1-15. (canceled)

16. A transgenic plant or a part thereof comprises a transgene, wherein the transgene comprises a DNA capable of expressing an inhibitory nucleic acid molecule capable of inhibiting the expression of one or both of a KRE5 gene and a KRE6 gene in a fungus.

17. The transgenic plant or the part thereof of claim 16, wherein the transgene comprises an expression cassette comprising the DNA.

18. The transgenic plant or the part thereof of claim 16, wherein the transgene is stably integrated into the genome of the transgenic plant or the part thereof, or wherein the transgene is present on a vector in the transgenic plant or the part thereof.

19. The transgenic plant or the part thereof of claim 16, wherein the inhibitory nucleic acid molecule is an antisense RNA or dsRNA.

20. The transgenic plant or the part thereof of claim 16,
wherein the DNA encodes an RNA molecule in sense direction and an RNA molecule in antisense direction,
wherein the RNA molecule in sense direction or the RNA molecule in antisense direction are substantially complementary to the KRE5 gene, the KRE6 gene, a part of the KRE5 gene, or a part of the KRE6 gene,
wherein the RNA molecule in the antisense direction is substantially reverse complementary to the RNA molecule in the sense direction, and
wherein the RNA molecule in the sense direction and the RNA molecule in the antisense direction are able to form a dsRNA.

21. The transgenic plant or the part thereof of claim 16, wherein the length of the antisense RNA, the dsRNA, the RNA molecule in sense direction or the RNA molecule in antisense direction is at least 15 contiguous nucleotides.

22. The transgenic plant or the part thereof of claim 21, wherein the length of the antisense RNA, the dsRNA, the RNA molecule in sense direction or the RNA molecule in antisense direction is 400-500 contiguous nucleotides.

23. The transgenic plant or the part thereof of claim 16, wherein the expression of the inhibitory nucleic acid molecule is controlled by a promoter.

24. An inhibitory nucleic acid molecule capable of inhibiting the expression of one or both of a KRE5 gene and a KRE6 gene in a fungus.

25. A DNA comprising the inhibitory nucleic acid molecule of claim 24.

26. An expression cassette comprising the DNA of claim 25.

27. A vector comprising (a) the DNA of claim 25, or (b) an expression cassette comprising the DNA.

28. A method of producing the transgenic plant or the part thereof of claim 16 comprising:
introducing into at least a cell of the plant (a) a DNA of claim 25, or (b) a dsRNA capable of inhibiting the expression of one or both of the KRE5 gene and the KRE6 gene in the fungus; and
regenerating the transgenic plant from the at least one cell.

29. A method of conferring fungal resistance to a plant or the part thereof comprising:
introducing into the plant or the part thereof (a) a DNA of claim 25, (b) an expression cassette comprising the DNA, or (c) a dsRNA capable of inhibiting the expression of one or both of the KRE5 gene and the KRE6 gene in the fungus; and
causing expression of the DNA or the expression cassette.

30. A method of inhibiting the expression of one or both of a KRE5 gene and a KRE6 gene in a fungus, comprising applying the DNA of claim 25 or an expression cassette comprising the DNA to the fungus or to a plant or a part thereof.

31. A method of inhibiting the expression of one or both of a KRE5 gene and a KRE6 gene in a fungus, comprising contacting a plant or a part thereof with the DNA of claim 25 or an expression cassette comprising the DNA.

32. A method of inactivating a fungus comprising applying the DNA of claim 25 or an expression cassette comprising the DNA to the fungus or to a plant or a part thereof.

33. A method of protecting a plant against an infection by a fungus comprising applying the DNA of claim 25 or an expression cassette comprising the DNA to the fungus or to a plant or a part thereof.

34. A composition comprising a fungus, wherein the fungus comprises (a) the DNA of claim 25, (b) an expression cassette comprising the DNA, or a vector comprising the DNA or the expression cassette.

The application's sequence listing, which the Patent Office published only in electronic form, follows.

SEQUENCE LISTING (376 sequences)

SEQ ID NO: 1 - protein, 1293 aa, Ashbya gossypii
MLHLRRQLAVTWLCLATVAAYDAARLWQSVVRAGINDVGQWYGALTGAEDEISVQELWAELGEDESTLLELLYETSVGVVEEVEHGAATNWFELNGKRYTGSDESFYLQSGELDAQQAVADATVLRVGEGVVGTAPEAPIVVLYGQAGSEEFEAFNWNLYREAQQGRIRLVWRPTCAGAGCGQPRVGAVYAHEYSVKGDWWSSTVRGEVAVPAEFAAKKYRLGGVKDENLSLLDLKVAALIAEQHGRTEDFAETLEYARQLINNFPLLAEHLVDREVDTNSTEVQLEEVTATGVTYDAIGLYINGQPWKLSSLDMRTFLLAIMNERKKMQHLVTTLQSKYGQLGVEDARSLLSKFCQVSVLNAQDMQPARYDFHRVPGFSESVIYFNDIEKDPQYSNMSTKLESIFEKSDYGVIPSYRKNWNELVFVVDFDSLDNEDTREILSGMVRAFSVADEGYPQRIGLLPLYRGDSNPIVENIYRHKESGIAEVKNYLRLLVLGERPGSEGAADIPPVKKILQDFSIFNNSLLINGQIHPFKKNTWHYLIASTVKHDVEILKSMAGRFPSTNVRELLHSKSLITRDSRYIVDYFDDATYTVEQISALDDLEKRVTVYQKGEAKKLYHTITLVDDFESKPALERLKNLLQIKFNGVRIRLLHIGETFSLYEELQRSLNEEENPLDTIGALLRKARDAPRFYTAIAERLQAWVPDLTREQTVGTAFAVINGRYVQFGPENSVSKSLWESFLQREASRTLDLLGIVDTHVPGMGDAKEDSDFVEQLTSILSQLFYSGSNIFHSGIEHTSESTLPRLNILEILPDELTGALIANGNRAAPVELAVILDPLEERSQTFLHLVDQVKSLSFLDIRLLLLPTKKLTIFPIHRIYSDDALSLSPTEAFTVGRELPHFLFPEPSNPEVASIIIEGYAFDEKLPVSKTTVESRMDVCLELLNAEGEVVDSTSTMSVFGYFQFLSPTLGYGFSIRSCSPEYEVTSFSTNAKADYVPSAEISIVDVTPQRVFVKLRGTDEKATGRDTNEQEGINIYVNIYDRSDETSFKEKLFAILAGTPQHTSVTFWLAYGAPISPDLQAVLRTAESLPGRHVACKPIRYAWPSWLRPQRFVDRRLDAARLLFLDVMLSHTMRGRLIMLSLTEERTPDVLELSELQTSAYLTMRPHRGHGYWEEGYWQNYLGKHNLRFFNPSRTFVVDLGRYRSLSAGDHLRVHYQRLSADATSLLDIDQDLVNSVQLLLKIRPLRINKFLPPATGEWIAAWPSNSVNDWTGNPPDTESASEEALDHDEL

SEQ ID NO: 2 - DNA, 3882 bp, Ashbya gossypii
atgttgcatctcaggaggcaattggcggttacatggctttgcttggccacggtagcagcgtatgatgctgcacggctgtggcagagtgttgtgcgagccgggatcaacgatgtgggacaatggtacggggcactgaccggcgcagaagacgaaataagcgtgcaggagctgtgggccgagttgggagaggacgagagcacgcttctggaactgctgtacgagacgtcggtgggcgtggtcgaggaagtagagcacggcgcagcgacgaactggtttgaactgaacggcaagcggtacacggggtcagacgagtctttctatctgcagtccggggagctggacgcgcagcaggcggtggcggacgcgacagtgctgcgggtgggcgagggcgtcgttgggacggcgcccgaggcaccgatcgtggttctgtacgggcaggcggggagcgaggagtttgaggcgttcaactggaacctgtaccgtgaggcccagcagggtcggattcggcttgtgtggcgtccgacatgtgcgggtgcgggctgcggccagccccgcgtgggtgcggtttacgcgcacgagtacagtgtgaaaggcgactggtggagcagcacagtgcgcggcgaggttgcggtgcccgcggagtttgctgccaagaaatataggcttggtggcgtgaaggatgaaaacctctcgctactggacctgaaagttgcggccttgattgcggagcagcatggccgcacagaggactttgcggagacgctcgagtatgcgagacagctcatcaacaacttcccgctgcttgctgagcacctggtagaccgcgaggtagataccaactcgacggaggtgcagttggaagaggtgaccgcgaccggggtgacgtacgatgcaattgggttgtacatcaatggccagccgtggaaactgtcgtcgctcgacatgcgcacgttcctgctggctatcatgaacgaacggaagaagatgcagcatcttgttaccaccttgcagagcaagtacggtcagttaggcgtagaagatgccaggtcgttgctttcgaagttctgccaagtcagtgttttgaatgctcaggacatgcagcccgctcgctacgatttccatcgtgttcctggattcagcgaaagcgtaatctacttcaacgatatagagaaagatccgcagtacagcaatatgagtaccaagctggagagcatctttgaaaagtcagactacggcgtgattccttcgtaccgcaagaactggaatgagctcgtattcgttgtggacttcgactcgcttgataatgaagataccagggaaatattgagtggcatggtgcgtgcgttcagtgtagctgacgagggctatccgcagcggattggcttacttccactttaccggggggattcgaaccccatcgttgagaatatctaccggcataaggagtccggcatcgcagaggtgaagaactaccttaggttgctagtcctcggagagcggcccggaagtgaaggagctgccgatatcccacctgtcaagaaaatattgcaagacttctccatcttcaataactctctgctaatcaatggtcagatccatccgttcaagaagaacacctggcattatctaattgcatctactgtgaagcacgatgtggaaatactgaagagtatggcaggacggtttccttcaactaatgtgagagaattgttacatagcaaatctctaatcacccgtgattctcgttacattgtggactactttgacgatgctacgtacacagttgagcagataagtgctctggatgacctggagaagagagtcacagtttatcagaaaggtgaggccaaaaagctttatcacactatcacgttagtagatgattttgaatcgaaaccggccctggaaagattaaaaaatttacttcaaataaaattcaatggggtacgcataaggttgcttcatatcggcgagacttttagcttgtatgaggaacttcagagatcactgaatgaagaagaaaacccattggacactattggtgcgctactccgcaaagctagagatgctccaaggttctatacagctatcgctgaacgtctgcaagcatgggtccctgatctcacccgggagcaaactgtaggaactgcctttgcggttatcaacggccgctatgttcaatttggcccggaaaattctgtcagcaagagcttgtgggagtccttcctacaaagggaagccagtcgcactttggatctgctagggatcgtggacacacatgtcccaggcatgggcgatgccaaggaagactctgattttgtcgaacagcttacttctattttaagtcaattgttttattccggctccaacatattccatagcggtatcgaacataccagcgaatctacattacccagattgaacatcctggagatattgccggatgagctaactggggcgctcatagccaatggtaaccgagccgcgccggtcgaattagcggtaattttggatcctctggaggagaggtcacagactttcctacacttagtcgaccaagtcaaatctttgagcttccttgacatccggcttctactactacccaccaaaaagctcactatcttcccaatacacaggatctattccgatgatgctctctcgctaagtcctacggaagcattcaccgtgggcagagaactcccacactttttattccctgagcctagcaaccctgaggttgctagcattattattgaaggatatgcattcgacgagaaattgccagttagcaagacaaccgtcgagagtcgtatggatgtgtgcctggaacttctaaatgccgaaggtgaggttgtagactcgacctcaacgatgagtgtgtttggctacttccagttcctatcgcctaccttagggtatggattctccatcagaagctgcagcccagaatatgaagtgacatcattttcaaccaatgcgaaggcagactacgtccccagtgcagaaatatccatagtagacgttactcctcaaagggtcttcgtgaaactccgtgggacagacgaaaaggccacagggcgtgatactaatgaacaggagggtataaatatttacgtcaatatttatgaccgatctgacgaaacatcttttaaggaaaagttgtttgctattcttgcaggcacaccgcaacatacttcggtaacattttggctcgcgtatggcgccccgatttcgcccgacctgcaagccgtgctgcgcaccgccgaaagcttgcctggtcgccacgtagcctgcaagcccattcgctacgcctggccctcctggctccgtccccagcgcttcgttgaccgcaggctggacgcagcccgtttgctcttcctcgacgtaatgctatcacatactatgcgtggccggctgatcatgctctccctaaccgaagagcgcactccagatgtcctagagctctctgagctacagacttccgcgtacctaaccatgcgccctcaccgtggccatggctactgggaggagggctactggcagaactaccttggtaaacataacctcaggttcttcaacccctcgcgtaccttcgtggtcgacctcggtcgctatcgttctctcagtgctggtgaccacctccgtgttcactatcagaggctgtctgcagatgcaacttccttattggacattgaccaagatctggtcaatagtgtgcagctgctcctgaaaattcggcccctacgcatcaataaattcctgcccccagcaaccggggaatggattgccgcatggcctagtaattctgtgaatgactggaccgggaaccctcccgacaccgagtcagcctccgaggaagccctcgaccacgacgagctctag

SEQ ID NO: 3 - protein, 1472 aa, Beauveria bassiana
MAIRLGSGLLVALLASSQVSASPAVNVRMQAAFNSGPYLLELLETATAENSSAYFPLLDRIAGGQFSRSSTEAELYNEFISVVRDDGHISSPEALSTFNLGLSLRSSAPRIEAHYQYYDTAVAIAEIDLSCEAWVLLEGNQYCTPQLDAAVRNGLLDPNITALPFDRSIGAGKHVVLYVDPASPHFRKFHAPLRIAAEAGEYNYRVRYRRPINASNKALHVSGFGVELALKRTDYIVIDDRASQSDAKAQKPLDTEAIFEEQELTDLRPLSTSELATLGMKSSSFIQSSKTPFETLVKLMQDFPKFSASISAHNVSANFSEEYQRGHIQRVPRGINALWMNGLQLIERQIEPFALVEMLRDERKLIDAVRNLGLNGDEAISLLGHESIAATQSDAGGTMRFDWTDKPEDGQAIIWLNDLENDDRYDQYPDDLSSLLQRTFPGQIPPIARNIFNVVTAIDPSDADDLTILGQLMALIGRGIPIRFGIVPAASSPESSNLAKIVYHLIRTYGFESLRNYIESVGEEPNTALGEAKFSQIINGLTPVAGNHPIKFLEVMENDDFNSRLEMAGRWISRLKASDNSSPIFFVNGVSTPRVANWLQRMSMQVSEDLQTIQRGIYHGVISDDVWVPGIFLEGALLRRNEYVSIDDAHPLRVLDVSKLYGDHKDLFGIIPVRNCDPQTERESWAAVTVITDAMTSRGVQLLISALKFKQSRPGVRLDIIHNPATTERASDLSKSSRAEASLLGLGMSEEVEKIVREAEASSSTGAYAVALKRFLSYAKIQPGSSCVILNGRMIGPIAPEHIFTEDDFVQLLAFERKSRILPVFEALDDLGLGNRISGPISAAKLTSIAALSTISNLPEGIFESSSSARTMIYRKWDAKHTTIEVGDAKTASIHLVALLNPLSEQAQRWAPLLKVLSELDGVHLKLFLNPKEKLEELPIKRFFRYVLESKPSFDDGGAIRTGQAIFSGLPSEALLTLGMDVPPAWLVAAKESMHDLDNIKLSSINSDIDASYELEHILIQGHSREGKSSPPRGAQLVLGTESEPHMTDTIVMANLGFFQFQANPGIYNIHLKEGRSAETFEIESVGAQGWAAVPGDEGTSLALLDFQGTTLYPRLLRKPGMEEVDVLEQADQVTENIVSKGFKLAESFLGNVLGKKSTANLQHAEINIFSVASGHLYERMLNIMMVSVMRHTKHTVKFWFIEQFLSPSFKEFIPHLAEEYGFKYEMVTYKWPHWLRHQKEKQREIWGYKILFLDVLFPLSIDKVIFVDADQIIRTDMMDLVKLDLEGAPYGFTPMCDSRTEMEGFRFWKQGYWANYLRGRPYHISALYVVDLRRFREIAAGDRLRQQYQALSADPNSLANLDQDLPNHMQFQLPIHSLPQEWLWCETWCSDESQGKARTIDLCNNPETKEPKLDRARRQVPEWTKYDDEIAAFAQRVKAAKSPDEDERRTNLERNTKSRNFEERPHTKDEL

SEQ ID NO: 4 - DNA, 4419 bp, Beauveria bassiana
atggccatccgtcttggaagtgggctgcttgttgcattgttggcttcatcacaggtgtctgcttcaccagctgtcaacgttcgtatgcaagcggcttttaatagcgggccatatctacttgaactacttgaaactgcgacggccgagaactcttctgcctactttcccctactcgatcgaatcgctggcgggcaattctccagatcatccaccgaagctgagctttacaatgagtttattagcgttgtccgggatgatggccacattagcagcccagaggcgctgtccacattcaaccttggactctctctacgctcttccgccccaagaattgaagcacattatcaatattatgatacagccgtcgcgatcgcagagatagatctttcctgcgaggcgtgggttcttttggaaggaaatcagtactgtactccgcaattggacgccgccgtaaggaatgggctgctcgacccgaatataactgctttaccgttcgaccgctccattggtgctggcaaacatgtagttctatatgtggatcctgcatctcctcacttcagaaagtttcacgcgccgctccggattgctgctgaagccggcgaatacaactaccgcgtacgataccgacgtccaataaatgctagcaataaggcgttgcatgtcagcggctttggggtcgaactagcactgaaaagaactgattatatcgtcatagatgatagggcgtcgcaaagtgatgcaaaagcacagaagcccttggatacagaggctatatttgaggaacaagagttgacagacctccgcccgctttcaacctcggagctagcaactctcggtatgaaatcctcctcgttcattcaaagtagcaaaactcctttcgagactctcgtcaaactgatgcaggacttccccaaattttctgcatcaatctcggcgcacaatgtgtcggcaaacttttccgaagaataccagcgaggccatattcagcgtgtaccaagaggaataaatgcgttgtggatgaatgggttacaactcatagaacgccaaatcgaaccgttcgccctcgttgagatgcttcgtgatgagcgaaagctcatcgatgccgttcgcaatctggggttaaacggagacgaagccatatcactgctcggacatgaaagcatcgcagcaacgcagtcagatgcgggaggaacaatgagattcgactggaccgacaaaccagaggatggtcaggcgatcatttggttgaatgatctggaaaatgatgaccgctatgaccaatacccggacgatttgagctctctgctccaacgcacgtttccaggacagatcccaccgatcgccaggaacatattcaacgttgttactgccattgacccctcggatgcggacgacctgacaattttgggtcaattaatggcacttattggccgtgggataccgattcgcttcggtattgtgcctgccgcatcaagcccagaatcttcaaacctagcgaaaattgtatatcatttgataagaacgtatggcttcgaatcacttcggaattatatcgagagcgttggtgaagagcccaacacagccctaggtgaagccaaattttctcagatcatcaatggcctgacgccagtcgctggaaatcacccaataaaatttctcgaagtcatggagaatgatgatttcaactcacgactagaaatggctggccgatggatttctagactcaaagcctcagacaactcctcgccaatattcttcgttaatggagtttcaacgcctcgtgttgcgaactggttacaaaggatgagtatgcaagtctcagaagatcttcaaacaatccagagaggcatataccatggtgtcatcagtgatgatgtctgggtcccaggtatctttttggaaggcgcattacttcgccgcaatgagtatgtatctatcgatgatgcccatcctcttcgagttctagatgtcagcaagctatatggagaccacaaggacctgttcggcatcattccggtgcgaaactgtgacccccaaacagaaagggaatcatgggctgccgtaaccgttatcactgatgcgatgacttcgcgcggcgtgcagcttctcatatcagccctcaaattcaagcagagtaggccgggcgtgcgacttgacattatccacaaccctgccactacagaaagggcttcggacctcagcaagtcttcgagggctgaagctagtcttctcggtcttggcatgagcgaagaagttgagaaaatagtgcgagaggcggaggcgagttcctcgactggtgcatatgccgttgccctgaagcgattcctatcctacgcaaaaatacagccaggcagcagctgtgtaattctaaatgggcgcatgattggcccaattgcaccagagcatatatttaccgaggatgactttgtacagctcttggcttttgagcgcaaaagtcggattctccctgtttttgaggccctcgacgatctcggtctaggcaataggatttctggacctatttctgccgccaaactgacgtctattgccgctctatcaaccatttccaacttaccggaaggtatatttgaatcatcttcatctgctcggaccatgatctacagaaaatgggatgcgaagcacacaacaattgaagttggcgacgcgaaaactgctagcatccacctcgttgctttgctcaatcctttgagtgagcaagctcagcgatgggcacctctcctcaaagtcttgtctgaacttgacggcgtgcatctcaagttgtttctgaaccccaaggagaagcttgaggagcttcccataaagcgattcttccgttacgttctagaatcaaagccctctttcgatgatggtggcgctattagaaccggacaggctattttcagtggacttccttcggaagctcttcttacacttggaatggatgtaccccctgcttggttagtagcagctaaagagtctatgcacgacttggacaatatcaagctatcttcaataaactccgacatcgacgccagttatgagcttgaacacattcttattcaaggtcactccagagaaggaaagtccagccctcctcgaggcgcccaacttgtcttgggaaccgagagtgagccgcacatgacggacacaatcgtcatggcaaaccttggattcttccaattccaagcaaatccgggcatatacaatattcacctaaaggagggccgaagtgcggagacattcgagattgagagtgtcggcgcacagggttgggcggctgttccgggcgatgaaggcacgtctctagccctactcgactttcaaggaacaacgctttatcctcgactccttcgcaagccaggcatggaagaggtagatgtgcttgaacaagccgaccaagtgactgagaacatagtttcgaaaggcttcaaactcgcagagagtttcttgggcaacgtcttgggcaagaagtccaccgcaaatttgcaacacgctgaaatcaacattttttccgttgcgagtggccacttatacgagcgcatgctcaacattatgatggtctctgtcatgcgccacacaaaacataccgtcaaattctggtttatcgagcaatttctgtcgccatcattcaaggagtttattcctcacctcgctgaggagtacggcttcaagtatgaaatggtgacatacaaatggccacactggctccgacaccaaaaagagaaacagcgagaaatttggggctacaagattctttttttggatgtcctgttccccctttctattgacaaggttatcttcgtggatgcggatcaaattatacgaacagatatgatggatctggtcaagcttgatcttgagggagccccgtacggattcactcccatgtgcgactcccggactgagatggaaggatttcgcttctggaagcagggttactgggcaaactaccttcgtggtcgcccctaccacatttctgctctctacgttgtcgatttgcgacgcttccgcgaaatcgccgctggagaccgccttcgacagcagtatcaagctctctctgccgacccgaacagcttggcgaacctggatcaagatttgcccaaccacatgcagttccagctaccgattcacagcctgcctcaggaatggctgtggtgtgagacgtggtgcagcgacgagagccaaggcaaggcgcgaaccattgatctctgcaacaaccccgagacaaaggagcccaagctcgatcgtgctcgccggcaagttcccgaatggaccaagtacgacgacgagattgcggcgttcgctcagcgcgtcaaggcggcgaagagccccgacgaggatgaacgacgaacaaatctggaaaggaacaccaagagtcggaactttgaggaacgtcctcacaccaaggacgagttgtga

SEQ ID NO: 5 - protein, 1508 aa, Bipolaris maydis
MRASASVLGAKALFVLAAFRHMGTLASPSINVALQAAFNPAPYLVELLETAAEENATAYYPILDRVAEGYFDDKTTDQELYTAFVDLLHADGHITQPEALASFEFALSVRSAAPRIEAHYQFYNTSVEPSLSAKQTEACDLWVSFHGKQYCSVHLDEPFGDITSERTYQLPFDRILGNSSALPAILYADITAPRFKKWHKTLSTTAKQGKTSYRIRHKPSPKAPTSPLVVNGYGVALQLKRTDYIVIDDRQAAEGDKNAAQKTMETGLNDEEDVADLKPLSKDEVSDLGLKAASFVLQSEDSMNTLLKLVQDFPKYSSIIAAHNASDEFLQGLEKNHNQWLMGGVNFIVVNGLTIPTRDVNPYSLLAHLRRERKLINGFRGQGLSVSEVVSLLSHPAIAQTNAGDSPQRYDFRDAAEGGNVIIWLNDIEKDPAYEDWPTSLQALLQRTFPGQLPSCRRDIHNVIVFADLTSTQDVTTLLDSIFNLIRRGIPLRWGIVPQSGSSEAIEQAKIVYHLLDAYGISAVEVYLQASLDGKKLAQPDQAIFDATVKTSTLLNERTALSFQDVLSSENLGQRIANSKQYVSRLAGEGPQPPILINGVAIPGNEEWLSSLSKRISLDLREIQKAIFEGNFNEDSWVPQHFLAQAASRRNPYIIPEDEKNITLINMAEFENTHSHAYSKMPRVDASESSSKSDWVHITLTADFDSEYGLSLLKSLAEFREANPNVEIVLIHNPVADVEKSGVSQDIFESFSKAGDKLTIDTLLELLAREPSSISFPEESRLFWKAAGPIYETLGIKPGQSSITVNGRHLGPIPEHIKFTKDELEGLVSYEMSKRAEPLSKALDDLGLLNKIESPFNIAKIQSLVALSTISDVPEGIFEQISTIRRSDDEKWNTEHTAIVKGDKDKAVFHIVAAIDPATEVAQKWVPILKTLGDMEGVHLTLYLNPKNNLQELPIKRFYRYVLEARPHFNPDGSVGNLSARFSGIPKEALLNLGMDVPPSWLVAPEESIYDLDNIKLSTIPAGSNVDAVYGLESILIEGHSRDTTNGGQPPRGAEVVLATEKDPHFADTIIMANLGYLQFKANPGFYNIQLKSGRSQQVFNLDSAGPISWAPRPGDETTEIALMSFQGATIFPRLSRKPGQETADVLAPEESLASELVGKGAQKVNQFLGKIGLNFDSEKVLQKGADLLSGKAVKKGTQADINIFSVASGHLYERMLNIMMLSVMKHTKHTVKFWFIEQFLSPSFKSFLPHMAAEYGFEYEMVTYKWPHWLRQQSEKQREIWGYKILFLDVLFPLDLEKVIFVDADQIVRTDMYELVQHNLEGAPYGFTPMGDSRTEMEGFRFWKTGYWANFLRGRPYHISALYVVDLVRFRQLAAGDRLRQQYHALSADPNSLSNLDQDLPNNMQFNLPIHSLPQEWLWCETWCSDEDLAKAKTIDLCNNPQTKEPKLDRARRQIPEWNVYDEEIAALARRVKGEQELAGLVDVQEQEQLREKKEKDAERVVEHSEL

SEQ ID NO: 6 - DNA, 4527 bp, Bipolaris maydis
atgagagcttcggcctctgtcctgggtgcaaaggcgctatttgtgctggctgcattccgccacatgggcacattggccagtccaagtatcaacgtcgccttgcaggccgccttcaatcctgcaccatatctggttgagctactagaaactgcagccgaggagaacgcgaccgcatactaccccattctcgaccgagttgccgagggctactttgacgacaagacgaccgaccaggagctgtatacagcctttgtcgacctgctacatgctgatggccacatcactcagccagaagctcttgcctccttcgagtttgcgctttcggttcggtcggccgcgccacgcatcgaggcacactaccagttctacaatacttcagtagagccttccttgtcggcaaagcaaacagaagcatgtgatctatgggtctcgtttcatggaaaacagtattgctcggtgcatctggatgagccctttggggacattacaagtgaacgtacataccaactaccctttgaccgcatactgggcaacagctcagctttacccgccattctttacgccgatatcactgccccaagattcaaaaaatggcacaagacactgagcaccaccgccaagcagggaaagacatcataccgcatcaggcacaagccatcccccaaggcgcccacgtcgccactagtagtcaatggatacggtgttgcccttcagttgaagcggaccgactacatagtcattgacgacaggcaagcagccgagggcgataagaacgctgcacagaaaacaatggaaactggcttgaatgatgaagaagatgttgccgatctcaagcctctttccaaagacgaagtatccgatctcggactcaaggctgctagctttgtgctccagagcgaggattccatgaatacccttttgaagctggttcaggactttcccaaatactcgtctatcatcgctgcccacaacgcttctgatgaatttcttcagggtctcgagaagaaccacaatcaatggttgatgggcggcgtcaatttcatcgtagttaacggcttaactattcccactcgtgatgtcaacccatattcgttgttagcgcacctgcggcgcgagcggaaactcatcaacggctttcgcggccagggtctctcggtctctgaagttgtatctctcttgtcacatccagccatcgcacaaaccaacgcgggtgactccccacagcgctatgactttagggatgctgccgaaggcggcaacgtcatcatttggctcaatgacatcgagaaggatccggcgtatgaggactggcccaccagcctccaagctctattgcaaaggacattccctggacagcttccatcctgccgcagagacattcataatgtcattgtgttcgctgatttgacatccacccaggatgtgacgactctccttgacagcatcttcaatttgatccgacgtggcattccgttgcgttggggtatcgtccctcagtctggctcttctgaagctatcgagcaggccaagatagtctatcacctgctggatgcttatggtatctctgcggtggaagtatacctgcaagcatcactggacggcaagaagcttgcacagcctgatcaggccatctttgatgcgacagtcaaaacctcgaccttgctcaatgagcgcacagccctttcatttcaagatgtcctttcttcagagaacttgggtcaacgcattgcaaactcaaagcagtacgtgagccgtttggctggggaaggcccgcaaccaccaattctaataaacggtgttgctattcctgggaatgaggagtggctctctagtctcagcaaacgaatcagcctcgatcttcgtgaaatccaaaaggccatattcgaaggcaacttcaacgaagatagctgggttccacagcatttccttgctcaggctgccagtaggcgcaatccttatattattccagaggacgagaagaacattaccctcatcaacatggctgagtttgaaaacactcacagccatgcatacagcaagatgccacgagttgatgcttccgagtcttccagcaaaagcgactgggtacatatcaccctcactgctgatttcgactccgagtatggcttgagcctgctcaagtccctggcagaattccgcgaggctaacccgaacgttgagattgtcttgatacacaatcctgtcgctgacgtggaaaagtccggcgtgtcgcaagacatctttgagtctttttctaaagcgggtgacaagcttacaatagacaccttgctggagctcctggctcgcgagcccagctccatctctttcccagaagagtctcgactattctggaaggcggccgggccaatatacgaaactcttggtataaagccaggtcaaagtagcataactgtcaatggacgtcatctaggccctatcccagaacatatcaaattcaccaaagatgagctagaaggactggtatcctatgagatgagcaaacgtgctgagcccttgagtaaagcattggacgatcttgggcttttgaacaaaatcgagtcgcctttcaacatcgccaagatacaatcattggtcgctttgtcaactatatcggatgtaccagaaggtatctttgaacagatttcaacaattaggagaagtgacgacgaaaagtggaacactgaacacactgccattgtcaaaggtgacaaagacaaggccgtgttccatatcgtggcagcgatcgatccggctaccgaagttgcccagaaatgggttcctatcttgaaaaccttaggcgacatggagggtgtgcatctcacactgtatttgaatcccaaaaacaatcttcaggagctccccatcaagcgcttctacagatatgttctcgaagcccgaccccatttcaatccagatggatctgttggtaacttgagcgcacgcttctccggtatccccaaagaggcactattgaatcttgggatggatgtgcctccttcatggctagtcgctccagaggaatccatctatgatcttgacaacatcaagctcagcactatcccagctggttccaacgtcgatgccgtctatggactggaaagcattctcatcgaaggtcactctcgcgataccaccaatggtggacaaccacctcgtggagctgaagtggttctggctactgagaaagacccacactttgctgacaccatcatcatggctaaccttggctatctccaattcaaagccaaccctggattctacaatattcagctaaagagtggtcggtcccagcaagtcttcaacctcgatagcgctggtccaatcagctgggcccctcggcccggtgacgagacaactgaaattgccctcatgagctttcaaggagctaccatctttccgcgactgtctcgcaagcctggtcaagaaactgctgatgtcctcgctccagaggagtctcttgcttccgaactggttggcaaaggcgcacagaaagtcaaccagttccttggcaagattggcctcaactttgactctgagaaggttctgcaaaagggtgccgatctgctgtcaggaaaggcagtgaagaagggcacgcaagcggatatcaacatcttctcagtcgcctcgggccacttgtacgagcgtatgctgaacatcatgatgctctccgtcatgaagcacacgaagcacacagtcaagttctggttcattgagcagttcctttcgcctagcttcaagtcgttcctgccgcacatggccgccgagtacggctttgagtacgagatggtcacgtacaaatggccacattggctacgccaacagtcggagaaacaacgcgagatctggggttacaagattctcttcctggacgttttgttccctctggacctcgaaaaggttatttttgtggatgcggatcagattgtcaggacggacatgtacgagcttgtgcagcataacctcgagggtgcaccctacggctttacccccatgggcgattctcgcaccgaaatggaaggcttccgtttctggaagactggctactgggctaacttcctacgtggccgtccctaccacatctccgccctctacgtcgtcgacctcgtccgcttccgccaactcgccgcgggcgaccgtctccgccagcaataccacgctctatccgctgaccccaactcgctctccaatctcgaccaggatcttccaaacaacatgcaattcaacctccccatccacagcttgccccaagaatggctctggtgcgaaacatggtgcagcgacgaggatctcgccaaggcaaaaacgattgatctctgcaataatcctcagaccaaagaacccaaactcgaccgtgcaagaagacagattccagagtggaatgtctacgatgaagagattgcggcgcttgcgagacgggtcaagggcgagcaggaacttgcgggtttggtcgatgtgcaggagcaggagcagttgagggagaagaaggagaaggatgctgagagggtggttgagcatagtgagttgtag

SEQ ID NO: 7 - protein, 1508 aa, Bipolaris sorokiniana
MRASASVLGAKALFVLTAFRHMGTLASPSINVALQAAFNPAPYLVELLETAAEENATAYYPILDRIAEGYFDDKTTDQELYTAFVDLLYADGHITQPEALASFEFALSVRSAAPRIEAHYQFYNTSVEPSLSAKQTEACDLWVSFHGKQYCSVHLDEPFGDIASERTYQLPFDRILGNGSALPAILYADITAPRFKKWHKTLSTTAKQGKTSYRIRHKPSPKAPTSPLVVNGYGVGLQLKRTDYIVIDDRQAAESDKNAAQKTMETGLNDEEDVADLKPLSKDEVSDLGLKAASFVLQSEDPMNTLLKLVQDFPKYSSIIAAHNATDEFLQGLKKNHDQWLMGGINLIVINGLTIPTRDVNPYSLLAHLRRERKLINGFRSQGLSVSEVVSLLSHSAIAKTNAGDSPQRYDFRDATEGGNVIIWLNDIEKDPAYEDWPSSLEALLQRTFPGQLPSCRRDIHNAIVFVDLTSTQDVTTLLDTIFNLIRRGIPLRWGIVPQSGSSEATEQAKIVYHLLDAYGISAVEVYLQASLDGKKLTQPDQAIFDATVKTSTLLDERTALSFQDVLTSEDLDQRIADSKQYVSRLAGEGPQPPILINGVAIPGNEEWLSSLSKRISFDLREIQKAIFEGNFNKDSWVPQHFLVQAASRRNPYIIPEDEKNVTLINMADFENTHSHVYNKMPRVHASESSSKSDWVHITLTADFDSEYGLSLLKSLAVFREANPNVEIVLIHNPAADAEKSGVSQDILESFSKIGDKFTVDTLLELLVRESSSISFPDESRLFWKAAEPIYDALGIKPGQNSIIVNGRHLGPIPENIKFTKDDLEGLVSYEMSKRAEPLSKALDDLGLLNKIESPFNIAKIQSLAALSTISDVPEGIFEQISTIRRNDDEKWNTEHTAIVKGDKDKAVFHIVAAIDPATEVAQKWIPILKTLGDMEGVHLTLYLNPKDNLQELPIKRFYRYVLEARPHFNADGSVGSLSARFSGIPKEALLNLGMDVPPSWLVAPEESIYDLDNIKLSTIPVGSNIDAVYGLESILIEGHSRDTTNGGQPPRGAEVVLATEKDPHFADTIIMANLGYLQFKANPGFYNIQLKSGRSQQVFNLDSAGPISWAPQPGDETTEIALMSFQGATIFPRLSRKPGQETADVLAPEESLASELVGKGAQKVNQFLGKIGLNFDSEKVLQKGADLLSGKAVKKGTQADINIFSVASGHLYERMLNIMMLSVMKHTKHTVKFWFIEQFLSPSFKSFLPHMAAEYGFEYEMVTYKWPHWLRQQSEKQREIWGYKILFLDVLFPLDLEKVIFVDADQIVRTDMYELVQHDLEGAPYGFTPMGDSRTEMEGFRFWKTGYWANFLRGRPYHISALYVVDLVRFRQLAAGDRLRQQYHALSADPNSLSNLDQDLPNNMQFNLPIHSLPQEWLWCETWCSDEDLAKAKTIDLCNNPQTKEPKLDRARRQIPEWNVYDEEIAALARRVKGEQELAGLVDVQEQEQLREKKEKDAERVVEHSEL

SEQ ID NO: 8 - DNA, 4527 bp, Bipolaris sorokiniana
atgagagcttcggcctctgtcctgggtgcaaaggcgctttttgtgctgactgcattccggcacatgggcacattggcaagtccgagtatcaacgtcgccctgcaggccgccttcaatcctgccccatatctggttgagctactagagactgcagctgaggagaacgcgactgcatactaccccattctcgaccgaattgctgagggctactttgacgacaagaccaccgaccaagagctttatacagcctttgtcgacctgctatatgctgatggtcacatcacgcagccagaagcccttgcctccttcgagtttgcgctttcagttcggtcggccgcgccgcgtatcgaagcacactaccagttctacaatacttcagtagagccttccttgtcggcaaagcaaacagaagcatgtgatctatgggtctcatttcatggcaaacaatattgctcggtgcatctggatgagccctttggggacattgcaagtgaacgtacataccaactaccctttgaccgcatacttggcaacggctcagctctaccagccattctttacgccgacatcactgccccaagattcaaaaaatggcacaagacactgagcaccactgccaagcaaggaaagacatcataccgcatcaggcacaagccatctcccaaggcgcccacgtcgcctctagtggtcaacggatatggtgttggccttcaattgaagcgtaccgactacattgtcattgacgacaggcaagcggccgagagcgacaagaatgctgcacagaaaacaatggaaactggcttgaacgatgaagaagatgttgccgatctcaagcctctttccaaagacgaagtatctgatctcggactcaaggctgctagttttgtgcttcagagcgaagatcccatgaatacccttctgaagctcgttcaggactttcccaaatattcgtccatcattgctgcccacaacgctactgatgaatttcttcaaggcctcaagaagaatcacgatcaatggttgatgggcggcatcaatctgatcgtaattaacggcctaaccattccgactcgtgacgtcaacccatattcgttgttggcgcacctgcgacgcgagcggaaactcatcaacggctttcgcagccagggtctctcggtttctgaagtcgtatctctcttgtcgcattcagccatcgcaaaaaccaatgcaggtgactccccacagcgctacgactttagagatgcaaccgaaggtggcaacgtcatcatctggctcaatgacatcgagaaggacccggcgtatgaggactggcccagcagcctcgaagctctattgcaaaggacattccctggacagcttccttcttgccgcagagatattcataatgccattgtgtttgttgacttgacatccacccaggatgtgacgactctcctcgacaccatcttcaatttgatcagacgtggcattccattgcgttggggtatcgtccctcagtctggctcttctgaagctaccgagcaggccaagatagtctatcatctactggatgcttatgggatctctgcggtggaagtataccttcaagcgtccctggacggcaagaagcttacacagcctgatcaggccatctttgacgcgacagttaaaacttcgaccttgctcgatgagcgtacagccctttcattccaagatgtccttacttcagaggacttggaccaacgcattgcagactccaagcagtacgtgagtcgtttggctggggaaggcccgcaaccaccaattctaataaacggtgttgctattcctgggaatgaggagtggctctctagtctcagcaaacgaattagtttcgatcttcgcgaaatccaaaaggccatattcgaaggcaacttcaataaagatagctgggttccacagcatttccttgttcaggctgccagtaggcgcaatccttatattattccagaggacgagaagaacgtcacgctcatcaacatggctgattttgaaaacacccacagccatgtatacaacaagatgccacgagttcatgcttccgagtcttcaagcaaaagcgactgggtacacatcaccctcaccgctgatttcgactctgagtatggcttgagccttctcaagtccctggcagtcttccgcgaggccaacccgaacgttgagattgtcttgatacacaatcctgccgctgacgcggaaaagtcgggcgtgtcgcaagacatccttgagtctttttccaaaataggtgacaagttcacagtagacaccttgctggagcttctggttcgcgagtccagctccatctcttttccagacgagtcacgactattctggaaggcagccgagccgatatacgacgctcttggtataaagccaggccaaaatagcattattgtcaatgggcgtcatcttggccctattccagaaaatatcaagttcaccaaagatgatctggaaggactggtgtcctacgagatgagcaaacgtgctgagcccttgagtaaggcattggacgatcttgggctcctgaacaagatcgagtcgcctttcaatatcgccaagatacaatcattggctgctttgtcaactatatcggatgtgccagagggtatctttgaacagatttcgacaatcaggagaaatgacgacgaaaagtggaatactgagcacaccgccattgtcaaaggtgacaaagacaaggctgtattccatattgtggccgcgatcgatccggctactgaagttgcgcagaaatggattcccattttgaagaccttgggcgacatggagggtgttcatctgacactgtatttgaatcccaaagacaatcttcaagagcttcctatcaagcgcttctatagatatgttctcgaagcccgacctcatttcaatgcggacggatctgttggtagcttgagcgcacgcttctccggtatccccaaagaggcactattgaatcttggtatggatgtgcccccttcatggctagtcgctccagaagaatccatctatgatcttgacaacatcaagctcagcactattccagttggttccaacatcgacgccgtctatggactggaaagcattctcatcgaaggtcactctcgcgataccaccaatggtggacagccacctcgcggagctgaggttgtcctagctaccgagaaagacccacactttgctgacaccatcatcatggctaaccttggctacctccaatttaaggccaaccctggattctacaatattcagctgaagagtggtcggtcccagcaagtcttcaacctcgatagcgctggtccaatcagctgggcccctcagcctggtgacgagactaccgagattgccctcatgagcttccaaggagctaccatctttccgcgactgtctcgcaaacctggtcaggaaaccgctgatgtgcttgctccagaggagtctcttgcttccgaactggttggcaaaggcgcacagaaagtcaaccagttccttggtaagattggtctcaactttgactctgaaaaggttttgcaaaagggcgccgatctgctgtcaggaaaggcagtgaagaagggcacacaggcggatatcaacatcttctcagtcgcctcgggccacttgtatgagcgtatgctgaacatcatgatgctctccgtcatgaagcacacgaaacatacagtcaagttctggtttattgaacagttcctttcgcccagcttcaagtcgttcctgccacacatggccgccgagtacggctttgaatacgagatggtcacgtacaaatggccacattggttgcgccaacagtcggagaaacaacgcgagatttggggctacaagattctcttcctggatgtcctgttccctctagacctcgaaaaggtcatctttgtggatgcggatcagatcgtcaggacggacatgtacgagcttgtgcagcatgacctcgagggtgcaccctacggctttacccccatgggcgattctcgcaccgaaatggaaggcttccgtttctggaagactggctactgggctaactttctacgtggccgtccctaccacatctccgccctctacgtagtcgacctcgtccgcttccgccaactcgccgcaggtgaccgtctccgccagcaataccacgctctatccgccgaccccaactcgctttccaacctcgaccaggatctcccaaacaacatgcaattcaaccttcccatccacagcttgcctcaggaatggctctggtgcgaaacatggtgcagcgacgaggacctcgccaaagcaaaaacgatcgatctttgtaataaccctcagactaaagaacctaagctagaccgtgcaagaagacagattccagagtggaatgtctacgatgaggagattgcggcgcttgcgaggcgggttaagggcgagcaggagcttgcgggtttggtggatgtgcaggagcaggagcagctgagggagaagaaggagaaggatgctgagagggttgttgagcatagtgagttgtag

SEQ ID NO: 9 - protein, 1491 aa, Botryotinia fuckeliana
MGGFTLPWGLSGALLASTYLHSICATASPAINVGLQTSFPSAPYLIELLETAATENVSSYFPLLDRIADGYFAKASTDKDLYDNFIKVLTEDGHMDAEALSSYKLALSMRVAAPRIEAQFQYYHTAAEASIKTEQSSSCPTWVLFDGHQYCSPTLDEPHGTVTGNSQTQELPFDYVLGNPTGPHSILYADITSPTFGLFHKTLVKTAREGKTSYRLRHRRAIDAGSNKPLMIPGYGVELALKRTDYIVIDDRKDDDEGTTKSKTEAKVKFEDEEVADLKPLSTSELSSLGLKASSFIMQSERPFDSLIKLSQDFPKHSSAIASHNVSSDFFAEHNYNRGKLVPAGVNVWWMNGVQMIDRQIDAIAILDILRKERRLINGVRDLGLTGPEAVQLLSHSSISEAKSDGDVQRFDWRDEIEGGSVIMWLNDIEKDKRYQEFPETLGALLQRTYPGQLPSVRKEIFNLVIPVDFSAIEDVALVAETLASFVKRKLVLHIGLVPITTSPAAVEQTRVLYHLLDVYGLSGAIAYLEASVMNGVAGPTEKSFQAATEGREVRAEKIAIPLVDLLKSDHYNDRIDAASRWTTRLSADGEFPPIFVDGVALSRDENWLQAMVQRLTADLQVIQQGVFNNLFTQESYIPDFFLSEATPRRNSLIVPESDKNLKIIDITTLSKQHGDVLSKLPKIGSDSASPKEDWAHMILVADLSSASGLELLFSAVKFRESVPALEITILHNSPGEMKTSDFSTHLFSHVQKKSDKPLVDAQVLPSLVSPEGPELDLTTQDSARTYWKEAGPLVRAAGLSPGENVILLNGRLVGPIPAGSKLNQEDFEQLISYERAKRITPVYAAMQSLGLSDKIADPLAGAKISSMVALSSVSDTPDGIFEQAPTNRISAFDVWNSSYTSIETGDSSTATIHMTVTIDPASEQGQKWVPIVKAISELEGVYLKMFLNPKERLQELPVKRFYRYVLESKPNFDDEGALIEPGASFTGVPQEALLTVKLDIPPAWLVAPKVSIHDPDNIKLSSIKADVDALYELEHILIEGHSRDMPSGSPPRGAQLILGTERDPHFADTIIMSNLGYFQFKANPGFYKIDLQSGRSSEIFKIDSIGSKGWAPGPGDDTSEVVLMSFQGATLYPRLSRKPGMEGEDVLEAKVESAMDYVSRGLNFAQGILGSKTKAAAAVEEQAEINIFSVASGHLYERMLNIMMVSVMKNTKHTVKFWFIEQFLSPSFKDFIPHLAAEYGFKYEMVTYKWPHWLRGQTEKQREIWGYKILFLDVLFPLSLDKVIFVDADQIVRTDMIELVNHDLQGAPYGFTPMCDSRTEMEGFRFWKQGYWEKFLRGLPYHISALYVVDLRRFRQIAAGDRLRQQYQSLSADPNSLSNLDQDLPNHMQQVLPIHSLPQEWLWCETWCSDESLKEARTIDLCNNPLTKEPKLDRARRQVPEWTLYDDEITAVDKKRKGINGDRNESAEGRNTKSRTLEEIVDTKTKKDEL

SEQ ID NO: 10 - DNA, 4476 bp, Botryotinia fuckeliana
atgggaggcttcactttgccatggggactctcgggagctctgttggcatctacatatcttcattccatatgtgctaccgctagcccagccatcaatgttggcttgcaaacatctttcccctcagccccatatctcattgagctgctagaaactgcagcaacagaaaatgtttcctcgtacttccctcttcttgaccgaattgcggacggctattttgcaaaagcatccaccgacaaagacctatatgacaattttataaaagttctgacagaagatggtcatatggatgcggaggcactttcatcatacaagcttgcattgtcaatgagagtggctgcgccccgcattgaagcacaatttcaatattatcacactgccgcagaggcctctataaaaacagagcaaagttcatcctgtccaacatgggtgctcttcgatgggcatcagtattgttcacccacattggatgaacctcacggcacagtgaccggcaattcacaaacacaagaactaccatttgactatgttctcgggaatcctaccggaccccattccatcttatatgctgatataacatccccaacatttgggttattccacaagaccttggtaaaaactgcccgtgaaggtaaaacatcttatcgtctccgtcataggcgcgcgatcgatgctggctcgaataagcctctcatgattcccggctatggtgtagagctcgcccttaaaagaactgactatatcgtgattgatgaccgcaaagatgatgatgagggaacaactaaatccaagaccgaggccaaggtcaaatttgaagatgaggaggtagctgatctcaagcccctctccacatcagagctttcttcactggggctcaaagcatctagtttcattatgcagagtgaaagaccatttgattccctgatcaagctttcacaagactttccaaaacattccagtgctatagcttcccacaacgtctcttccgatttctttgcggagcacaattacaaccgcggcaaattggtccctgcaggcgtcaatgtatggtggatgaacggtgtacaaatgattgatcgtcaaattgatgctatagccatcctcgatattttacgaaaggaaagaagactcatcaatggtgttcgcgatcttgggttgacaggacctgaagctgtccagctactctcccattctagcatctccgaagctaagagtgatggagacgttcaaagatttgattggagagatgaaattgagggaggtagtgttatcatgtggttgaatgacatcgaaaaggataaacgctaccaagaatttcccgagactcttggcgccttactacaaagaacatatcctggccagctaccctcagtccgtaaggaaatttttaacttggttataccagtggatttcagcgcgatagaagacgtagcactggttgctgaaacacttgcaagtttcgtcaaaagaaagttagtcctccatattgggcttgttccaattaccacttctccagccgctgtagagcaaacaagggtcttgtatcatcttttggatgtttatggactctctggagctattgcttatcttgaggcttctgttatgaatggggtagctggccctactgaaaagtctttccaggccgctaccgagggacgagaggtccgagccgagaagatagcaattcctcttgtggatttactgaagtcagatcattataatgatagaattgatgctgccagccgctggaccacaagactctctgcggatggcgaattcccaccaatcttcgtagatggagtcgcgctttccagagatgaaaattggttgcaagcaatggttcagcggctcaccgcagacttgcaagttattcagcagggagttttcaacaacttatttacccaagaatcttacatcccagacttcttcctttccgaagcaacaccacgacgaaactccctcatagttccagagagcgacaagaatctgaagataattgatattaccactctttcgaagcaacatggcgatgttctttccaaattaccaaagattggatcagattcggcatcgcctaaggaggattgggctcacatgattctggtagcagatttatcatctgcttctggtttggaactccttttctcagcggtcaaatttcgggaatctgttccagctctcgagattaccatcctacacaattctcccggtgaaatgaaaacgtcggatttcagtacccatttgttttcacatgtccagaagaagtcagacaaaccacttgtcgatgcacaagttttgcctagtttagtgagccctgaaggacctgaattggatcttacgactcaagattccgcaaggacttattggaaggaagctggtccactggtccgagctgcaggcttatcaccaggtgaaaatgtcatcttgctcaatggacggcttgttgggccaatacctgctggctccaaactcaaccaagaagatttcgaacagttgatctcatatgaacgtgctaaacgtataactcctgtttatgctgccatgcaaagtcttggattgtcagataagattgccgatcctttggctggtgccaaaatttcctcgatggttgcgttgtcatctgtatcagatacacccgatggtatatttgagcaggcaccaactaacagaatcagtgcatttgacgtttggaactcttcttatacatccattgaaacaggagattcatcaactgcaaccatacatatgactgttactatcgatccagccagtgaacaagggcagaagtgggtcccaatcgtgaaggcgatatctgaactcgaaggagtctatcttaagatgttcttaaaccccaaagaacgcctccaagagcttccagtcaagaggttctatagatatgtactagaatcgaagcccaattttgacgacgaaggtgctttgattgagcctggtgcctcgtttaccggtgtgccacaggaggcattgttgactgtcaagttggacataccaccagcatggctagttgcccctaaagtttctatccacgatccagataacatcaaactcagctctatcaaggctgatgtagatgcgttatatgagcttgaacatattctcattgaaggtcactcaagggacatgccatctggcagtcctcctcgcggagcacaacttattctaggaactgagagagacccgcattttgccgacaccataataatgtctaacctagggtacttccaattcaaagccaatcctggattttacaagattgatctacagagtggaagaagctctgaaatattcaaaattgatagcataggctcaaaaggatgggcgcctggtcctggtgatgatacctcagaagttgttctcatgagctttcaaggagccactctatatcctcgcctttctcgcaagcctggtatggaaggagaagacgttcttgaagctaaggttgaatctgcaatggattacgtctcccgaggattaaactttgcgcaaggcatcttgggtagcaaaacaaaagctgctgcagcggtggaagagcaggctgagatcaatattttctccgttgctagtggccatctttatgagcggatgctgaatataatgatggtcagtgtcatgaagaacacgaagcacacggtaaaattctggttcattgagcaatttttgtccccatcttttaaagatttcattcctcatcttgccgcagaatatggcttcaaatacgaaatggtaacgtataaatggcctcattggctccgaggacaaactgagaagcaacgtgagatctggggctacaaaattctcttcctggatgttcttttcccattatccttagataaggttatcttcgtggatgccgatcaaatcgttcgtacagatatgatcgagctcgtaaatcatgatcttcaaggtgcaccatatggcttcactcctatgtgcgatagcagaaccgaaatggagggtttccgtttctggaaacaaggctactgggagaaattccttcgcggcttaccataccatatcagtgctctctacgttgtagatctccgccgattccgccagatcgctgccggagatcgtcttcgtcaacaatatcaatcgctctctgcagacccaaatagtttgtcaaacttggatcaagatttaccaaaccatatgcaacaggttcttcctatccacagtctaccgcaagaatggctttggtgtgaaacttggtgcagtgacgagagtcttaaagaggcgagaacgattgatttgtgcaacaatcctttgaccaaggaaccgaagttggatagagcaaggagacaggtaccagagtggacattgtatgacgatgagattacggctgttgacaagaagagaaagggaatcaatggagatagaaacgagagtgcggagggtaggaatacgaaaagtagaacattggaggagatagtggatacaaaaaccaagaaagatgagttgtag

SEQ ID NO: 11 - protein, 1492 aa, Colletotrichum graminicola
MLRLSRLPMGLALTLSAAVNVLAVPSVTVDMKAAFPSGPYLLELLETAAGENATAYFPLLDRIANGYFSEAKTDKDVYDKFLHVLNEDGHVNTPDALSTFKLALSLRTAAPRIEAHYQYYRTAVEPKLGSDAQDGCEAWVELGGKQYCAPTLDTPKEPESALDGSKVLPFDRVLGSGGEAILYADPASSAFGPFHSTLAEKARKGEIEYRLRYTKPAGIYEEPLPVSGYGVELALKRTDYIVIDDREAQSDDSQKIANAGEVLDAAEDVADLKPLAKSELQELGLKAASFIMQSQDPFETLLRLTQDFPKFSTSIAAHNVSTNFLAEHQLNRQQLVPSGMNVLWMNGVQLIERQIEAFTIIDLLRRERKLIDGVRDLGFTGGQAVSLLGHPKVAESKADDEPPRFDWTDDEEKEEVIMFLNDLEKDERYKDFPSQLTALLQRVYPGQLPPIRRDIFNLIVPVDFSKIEDLNVVAQLNTFIQRKVPIRFGLVPLTPTEDAAKITKVLYYLLDNYGLEVFIEYLDAAMQDAKTEKPDQSVFEKAIKDREPLPTAKLLAFDDVLQSQELHNVLELARSWVKRLNANTPIPPVFINGIPVPRENNWLQAMSMKASSDLQTIQRAVYFGAITEEVWFPDFFLEKAVKRRNTYIYPEDDKSIKILDVNKIYTEHDGLFSNIPAIEAYADSTKENWAVLTIVGDFVSDQGASLLLTALAFRRSNPGVRLDIVYNPPTSASASAVNTALKNSGDKLAEVESISDLKAIFDSAAVEPDGMFTAALSKFLSFAAIKPGSNLVILNGRVIGPFTEAEPFQGDDFQFLLEFEQKARILPVYAAVDDLGLTDKISGPLAAAKITSVTALSTISDLPADIFESAPSMRVSAHDQWNSTYTAIEIGNPETSSVHIVGVLNPASEQAQRWAPILKVVSKLDGVYLKLFLNPQEKIDELPVKRFFRYVLESEPSFDEAGKVRGLEASFKGLPSEALLNAGMDVPPSWLVAPKVSVHDPDNIKLSSIKSNVYASYELESILIEGHSREGGQSQPPRGAQLVLGTEKEPHFADTIIMANLGYFQFKASPGFYNIQLKSGRSSEIYTIDSIGAKGWNPVPGDEGTEVVLMDFQGTTLYPRLSRKPGQEEADVLAEPEDNSIVGRGLKFAEGILGKKKSASDEEHAEINIFSVASGHLYERMLNIMMVSVMKNTKHTVKFWFIEQFLSPSFKDFIPHMAKEYGFKYEMVTFKWPHWLRQQKEKQREIWGYKILFLDVLFPLSLDKVIFVDADQIVRTDMISLVNHDLEGKPYGFTPMCDSRTEMEGFRFWKQGYWANYLRGQPYHISALYVVDLRRFRELAAGDRLRQTYHSLSADPNSLANLDQDLPNHMQFQIPIHSLPQEWLWCETWCSDESQKDAKTIDLCNNPQTKEPKLDRARRQVPEWSVYDNEIAALDRKRKGLLVEAPKKEETKAGGGGEGEQQKPVIAEEDKNTKSRNWEEPPAENTHVIDEL

SEQ ID NO: 12 - DNA, 4479 bp, Colletotrichum graminicola
atgttgcgcctctcccgactgccaatgggccttgccctgacgctgtcggcggccgtcaatgtcctcgccgttccctccgttaccgtggacatgaaggccgccttcccgtctggcccctatcttctcgagctgcttgagactgctgcgggcgaaaacgcgacagcctatttccccctgctcgaccgcatcgccaacgggtactttagcgaagccaagacagacaaagatgtctacgacaagttccttcatgtcctcaacgaggatggtcacgtcaacactcccgatgctctctctactttcaagctggctctttccctcaggaccgccgcgcctcggatcgaggctcactaccagtactaccgaaccgctgttgagcccaagctcggatccgacgcccaggatggctgtgaagcttgggtcgagctgggaggaaagcaatactgcgctcccaccctggatactccgaaagagcccgagtcggccttggacgggtcaaaggtcctgcccttcgatcgagtcctgggatccggcggtgaggctatcctgtacgccgacccagcttcgtctgctttcggcccattccacagtaccttggcggagaaagcacgcaaaggggagatcgagtatcgtcttcgctacacgaagcctgccggtatctatgaggagcctctgcctgtcagcggatacggagtcgagctcgccctgaagcgaaccgactacatcgttatcgatgaccgtgaggcgcaatctgacgactcgcagaagattgccaacgccggagaggtgcttgacgccgccgaggatgtggctgatttgaagcctttggcaaaatccgaacttcaggagctcggtctcaaggccgcgtctttcatcatgcagagccaggacccctttgagactctacttcgacttacgcaggactttcccaagttttcgacctcaattgctgctcataacgtctctacgaatttccttgccgagcaccagctgaaccgccagcaactagttcccagcggcatgaacgtgctctggatgaacggcgtgcagctcatcgagcgccagattgaggccttcaccatcattgacctgcttcgccgcgaacgcaagctcattgacggtgtccgcgatctcggcttcactgggggccaagcggtgtctctccttggtcatcccaaggttgctgagtccaaagccgatgacgagccgccgcgcttcgactggacggacgacgaggagaaagaagaagtaatcatgttcctcaacgatcttgaaaaggacgagagatataaggatttccctagccagttgacggcgcttctccagcgcgtttaccccggtcagctgcctcccatcaggcgagacattttcaatcttatcgtccccgtggacttctccaagatcgaggacctcaatgtggtggctcagctcaacactttcatacagcgaaaggtcccgattcggttcggtctggtccctttgacacccaccgaggatgctgccaagatcacgaaggttctgtactaccttctggacaactacggcttggaggtgttcatcgagtatctggatgccgccatgcaggacgccaagacggagaaaccggatcagagcgtcttcgaaaaggcaatcaaggatcgcgaaccgcttccgactgccaaactgcttgctttcgacgatgtgttgcaatctcaggagctccacaacgtgttggagctggcccggagctgggtaaagagactgaacgcgaacacccccatcccgcctgtgttcatcaacgggattcccgtccctcgcgagaacaactggctgcaggctatgagtatgaaggctagcagtgatttgcaaaccatccagcgagctgtctactttggtgcgattactgaggaagtctggtttcccgatttcttcctcgagaaggccgtcaaacgccgaaacacctacatttacccagaagatgacaagtctattaagattctggacgtcaacaagatatacactgaacatgacggcctctttagcaatatccccgccattgaggcgtacgccgactctaccaaagagaactgggcggtcctgactattgtaggcgatttcgtttccgatcaaggggccagtcttctccttacagctttggcgttccgccgaagcaaccctggcgttcgtttggatatcgtctacaacccgcccacatctgcttcagcatccgccgtcaacacggcactgaaaaatagtggggacaagcttgccgaagtcgagtctatatctgatctcaaggccattttcgacagcgccgctgttgaaccagatggaatgttcacagcagctctcagcaaatttctgtctttcgctgccatcaagccgggttccaaccttgttatccttaacgggcgggtgatcgggccctttaccgaagctgagccttttcaaggtgatgatttccagttcctcctggaattcgaacagaaggcccgcatcttgcccgtttacgcagcggtcgatgatcttggactgactgacaagatatccgggccgctggcggctgctaagatcacgtcggtcacagcactttcgaccatttctgatttgcctgccgatatcttcgaatctgcaccgtctatgcgcgtcagcgcccatgaccagtggaactctacctacaccgctattgagattggaaacccagagacctcaagcgtccacatagtcggtgttttgaaccctgctagtgagcaggcacagcgatgggcgccgattctgaaggttgtatccaagctggacggagtctacctgaagctcttcctcaacccccaggaaaagattgacgagttgcccgtcaagagattcttccgatatgtcctagagtctgagccgagcttcgatgaggctggcaaggtgcggggactcgaggcatctttcaagggcctgccctccgaggcccttctcaatgccggcatggatgttcctccgtcgtggctggtggcgcccaaggtctcggtccatgatccagacaacatcaagctgagctccatcaagtctaacgtgtacgcatcctacgagcttgagagcattctgattgaaggacattcgcgcgagggcgggcagtctcagcccccgcgtggtgcccagcttgtcctgggcaccgagaaggagccccatttcgcggacaccatcatcatggccaaccttggatacttccagttcaaggctagcccgggcttctacaacattcagctcaaatcgggaagaagctcggagatttataccattgacagtatcggcgcaaagggatggaatcccgtaccaggtgatgaaggtaccgaggtcgtactcatggacttccaaggcacgacgctgtatccccgtctgtcgcgcaagccaggccaggaggaagccgacgtcctggcggagcctgaagacaacagcattgttggccgtggtctcaagttcgccgaaggcattctgggcaagaagaagtcggcatctgatgaggagcacgccgagatcaacatcttctccgtcgccagtggccacctctacgagcgcatgctaaacatcatgatggtcagcgtcatgaagaacaccaagcacacggtcaagttctggttcattgagcagttcctctcgccgtcgttcaaggatttcatcccgcacatggccaaggaatacggtttcaagtacgagatggtgaccttcaagtggcctcactggttgcgtcagcagaaggagaagcagcgcgagatctggggctacaagatcctcttcctcgacgtgctcttcccgctgtccctggacaaggtcatcttcgtcgatgccgatcagattgtccgcaccgacatgattagccttgtcaaccacgacctcgagggcaagccgtacggcttcacgcccatgtgcgattcccgcaccgagatggagggcttccgcttctggaagcagggctactgggccaactacctccgtggccagccgtaccacatctcagcgctgtacgtcgttgacctgcgccgcttccgcgagctcgccgccggcgaccgcctgcggcagacgtaccactctctcagcgccgaccccaacagtctggccaacctagaccaggatctgcccaaccacatgcagttccagatccccattcacagtctgccgcaggagtggctgtggtgcgagacgtggtgctccgacgagagccaaaaggacgcaaagacgatcgatctctgcaacaacccgcagaccaaggagcccaagctcgaccgcgcgcgtcgccaggtgcccgagtggagcgtctacgacaacgagatcgccgctctcgaccgcaagcgcaagggcctgctcgttgaagcacccaagaaggaggagaccaaggccggcggcgggggtgagggcgagcagcagaagcccgtcatcgccgaggaggacaagaacaccaagagccgcaactgggaggagccccctgcggaaaatacgcatgtcatagatgagctatag

SEQ ID NO: 13 - protein, 1447 aa, Colletotrichum gloeosporioides
MVRPYQLPMGIALTLLAASNVAAVPSVTVDMKAAFPSGPYLLELLETAAGENATSYFPLLDRVASGHFADSKTDKDVYDKFLQVLRDDGHITTPDALSTFKLALSLRTAAPRVEAHYQYYRTAVEPKLESDTQDGCEVWAELGGKQYCTPALDAPKDTKLTEAKALPFDRTLGSGSEAVLYADPTSPGFGAFHSALAQKARNGEVEYRLRYTKPAGSYEEALPKKITSEEVLDAAEEVTDLKPLAKSELEQLGLKAASFVMQNQNPFEALLKLTQDFPKFSTSIAAHNVSEKFLAEHQLNRQQLVPSGMNVLWINGVQLIERQIEAFTLVDILRRERKLIDGVRDLGFSGGQAVALLGHPKVAESKADDEPPRFDWTDDIEEGKVIIFLNDLEKDEQYANYPTELMSLLQRVYPGQLPPIRRDIFNLIVPVDFSKIEDLSVVSQLNTFVKRKLPLRFGLVPLTPTEESVGVAKILYYLLDSYGMEAFVDYLDAALQDSKTDKADAACFEKAIKDRELLPEATAVAFEDVLQSEGAQQVIKLAQQWAKRLNANTPIPPVFIDGVPVPREGNWLQAMSVKAANDLQTIQRAVYMGMVDEEMWIPDFFIEKALKRRNTYIYPENDKSLKILDVNKIYTDHDDLFSKVPVIEAYADSTKENWAVLTVVADLTTDAGADLLLSALAFRRNNPGVRLDVVHNPKNPASASSVNKALKSSDKLAEAETIADIKTISEAADSDSDAIYAAALNDFHSFAAIKPGSNLLILNGRIVGPFAAEEPFEADDFQYLLEFEQKARILPVYSAVDELGLTDKIAGPLAAAKITSVTALSSMSDLPEDIFETAPSVRVSAYDTWNSTYTAIEIGNPETSSIHLVGLLNPASEQAQRWAPILKVLSELEGVYLKLFLNPKDKIDELPVKRFFRYVLDSEPTFDETGKVRALEASFKGLPSEALLNAGMDVPPSWLVAPKVSVHDPDNIKLSSIKANVHASYELESILIEGHSREGKATQPPRGAQLVLGTEKEPHFADTIAMANLGYFQFKANPGFYNIQLKQGRSSEIYTIDSIGAKGWNPVPGDEGTEVVLMDFQGTTLYPRLSRKPGQEESDVLFVEEDNSLVGRGLKFAGGILGKKTKSISDEEHAEINIFSVASGHLYERMLNIMMVSVMKNTKHTVKFWFIEQFLSPSFKDFIPHLAEEYGFKYEMVTFKWPHWLRQQKEKQREIWGYKILFLDVLFPLSLDKVIFVDADQIVRTDMINLVNHDLEGKPYGFTPMCDSRTEMEGFRFWKQGYWANYLRGQPYHISALYVVDLRRFRELAAGDRLRQTYHSLSADPNSLANLDQDLPNHMQFQIPIHSLPQEWLWSDESQREAKTIDLCNNPQTKEPKLDRARRQVPEWTVYDDEIAALDRKRKGLPAEAPKKEDTKIECDKTVEEKNTKSRNWEEPPSEKTHVIDEL

SEQ ID NO: 14 - DNA, 4344 bp, Colletotrichum gloeosporioides
atggtgcgcccgtaccagctgccaatgggcattgccctgacgctgttggcagcctccaatgttgcagccgtaccctccgtcactgtggacatgaaagcggccttcccgtctggtccctaccttctcgagctgctagagactgctgcaggtgaaaacgcaacatcttactttcctctgctcgaccgcgttgctagcggacatttcgccgactccaagacggacaaggatgtttacgacaagttcctccaggtcctccgcgacgatggacacatcaccactcccgacgctctctccaccttcaagctggctttgtctctgagaacggctgctccacgagtcgaggctcactatcaatactaccggaccgctgtcgagccaaagctcgagtctgatactcaggatgggtgtgaggtgtgggccgagttgggaggaaagcaatattgcaccccggccttggacgcccccaaggacaccaagttgactgaagcgaaagctttgcccttcgaccggactttgggttcaggaagcgaagccgttctctacgcagaccccacgtcacctggctttggtgcatttcacagtgccctggcgcaaaaggcccgcaatggcgaagtagagtaccgcctgcgttacacgaagcccgccggcagctacgaggaggcgcttcctaaaaagatcacctccgaggaggttctggatgctgcagaagaggtgacggatctcaagcctctcgcaaagtcggagctggaacagctaggtctcaaggcggcttcgttcgtaatgcagaaccagaacccattcgaggctctcctcaagctcactcaggacttccccaagttctccacctcaatcgccgctcacaatgtatcggagaagttcctggccgagcaccaacttaaccgccaacagctggtgccaagcggtatgaatgtgctttggatcaacggagtccagctcatcgagcgccagatcgaggccttcaccttggtcgatatccttcgccgcgagcgcaagcttattgatggcgttcgggatctgggcttctcgggaggacaggctgttgcgctccttggtcatcccaaggtcgccgagtccaaggctgacgatgagcccccgcgttttgactggacagatgacattgaagaggggaaggttataatcttcctcaacgacctggagaaggatgagcaatacgcgaactaccctacggaattgatgtcgctcctccagcgcgtctaccccggccagcttcctcctatccgccgagacatcttcaatctcatcgttcctgtcgatttctccaagatcgaagatctcagtgtggtatcccagctcaacaccttcgtaaagcgcaagcttcccctgcggttcggtctggttcctctgactcccactgaggagtctgtcggtgttgccaagattctctactatctccttgacagctatggcatggaagcctttgttgactacttggatgctgctttgcaagactccaagacagacaaggcggatgcagcctgctttgagaaggccatcaaggaccgtgaacttctgcccgaggctaccgctgttgcgttcgaggatgttctgcaatcagagggtgcccagcaggtgatcaagcttgcgcagcaatgggccaagagattgaacgctaacaccccaattccacctgtctttattgacggtgtacctgtgccgcgtgaaggcaactggctccaagccatgagcgtcaaggctgccaacgacttgcagaccatccaaagggctgtctacatgggtatggttgacgaagagatgtggattcctgacttcttcattgagaaggcactgaagcgacgcaacacatacatctacccggaaaacgacaagtccctgaagatcttggatgtcaacaagatctacaccgaccatgatgacttgttcagcaaggttccagtcattgaagcctacgctgactccacaaaggagaactgggcagtgttgactgttgttgctgacctcacaactgacgctggagctgatcttctcctttctgccttagcgttccgtcgcaacaaccccggagttcgcctggatgtagtccacaacccgaagaaccctgcctcggcctcttctgtcaacaaagcattgaagagcagcgacaagcttgctgaagctgagactattgccgatatcaagacgatctctgaggcagctgacagcgactctgatgcgatctatgctgcagccctcaatgatttccactcttttgctgccattaagcctgggtcaaacctgctcattctcaacggccgcatcgttggtcccttcgccgccgaggagccttttgaggctgatgacttccaatacctgctcgagttcgaacaaaaggctcgcattcttcccgtgtactctgctgttgatgaactcggcttgaccgacaagattgcgggacctctagcggctgctaagatcacctctgttaccgccctctctagcatgtctgacttgcctgaggacatcttcgaaactgcgccatctgttcgtgtcagtgcctacgacacctggaactcgacatacaccgccatcgagatcggtaacccggagacctcgagcatccatctggtcggtcttctgaaccctgccagcgagcaagcccagagatgggcccccatcctgaaggtcctttccgagcttgagggagtctatctgaagcttttcctcaacccgaaggataagatcgacgaacttcccgtcaagagattcttccgctatgtcctcgactccgagccgacttttgacgagaccggtaaggtgcgcgccctcgaagcctccttcaagggtcttccttccgaagccttgctgaatgctggcatggacgtgcctccatcttggctcgtcgcccccaaggtctcggttcacgaccctgacaacatcaagctcagctccatcaaggccaacgtccacgcctcctacgagcttgagagcattcttatcgagggtcactcgcgcgagggcaaagctacccaacctcctcgcggtgcccagctcgtacttggcaccgagaaggagcctcacttcgcagacacgatcgccatggccaacttgggttatttccagttcaaagccaacccgggcttttacaatatccagctcaagcagggtagaagctccgaaatctacaccattgacagcattggcgcgaagggatggaaccccgtccccggtgacgagggcaccgaggtagtcctcatggatttccagggaaccacgctctaccctcgcttgtctcgcaagccaggccaagaggagtcggacgtcctctttgtggaggaagacaacagccttgtcggtcgcggtctgaagtttgcaggaggcatcctgggcaagaagaccaagtctatctcagacgaggagcacgcggagattaacatcttctccgtcgcaagcggtcacctttatgagcgcatgctcaacatcatgatggtctccgtgatgaagaacaccaagcacacagtcaagttctggttcattgagcaattcctctctccctccttcaaagatttcattccccacctggctgaagagtatggcttcaagtacgagatggtaacattcaaatggcctcactggctccgccaacaaaaggaaaagcagcgcgagatctggggctacaagatcctcttcctcgacgtgctcttccccctctccctcgacaaggttatcttcgtcgacgcagaccaaatcgtccgcaccgacatgatcaacctcgtcaaccacgacctcgaaggcaaaccctacggcttcacacccatgtgcgactcccgcaccgagatggaaggcttccgcttctggaagcagggctactgggctaactacctccgtggccaaccgtaccacatctccgccctctacgtcgtcgacctccgccgcttccgcgagctcgccgccggagaccgcctgcgccagacataccactccctcagcgccgaccccaactccctcgcaaacctggaccaggacctgccgaaccatatgcagttccagatccccatccacagcctgccgcaggagtggctgtggtccgacgagtcccagcgcgaggccaagacgattgacttgtgcaacaacccgcagaccaaagagcccaagctcgaccgcgctcgtcgccaggttcccgagtggactgtgtacgatgatgagattgcggcgttggaccgcaagcgcaagggtctgccagccgaggcgcccaagaaggaggataccaagatcgagtgcgacaagacggtagaggagaagaacaccaagagccgaaactgggaggagccgccgtccgagaagacgcatgtgatagatgagctatag

SEQ ID NO: 15 - protein, 1477 aa, Colletotrichum orbiculare
MVRPYQLPMGIALTLLAASNVAAVPSVTVDMKAAFPSGPYLLELLESAAGENATSYFPLLDRIASGHFSDSKTDKEVYDKFLQVLHDDGHITAPEALSTFKMALSLRTAAPRIEAHYQYYQTAVVPKLESDAQDDCEVWAELGGKQYCTPSLDAGKDTKLSEAKALPFDRTLGSGNEAVLYADPTSSSFGAFHSALAQKARHGEFEYRLRYTKPANSYKEPLPVSGYGVELALKRTDYIVIDDREAHSDDSQKTVTSEGVLDAEEEVADLKPLSKSELELLGLKAASFIMQSQNPFEALVRLSQDFPKFSTSIAAHDVSENFLTEHQQNRQQLVPSGMNVLWMNGVQLIERQIEAFTLIDILRRERKLIDGVRDLGFSGGQAVSLLGHPKVADSKADDEPPRFDWTDDLEEGKVIIFLNDLEKDERYAEFPTNLMSLLQRVYPGQLPPIRRDIFNLVVPLDPSNADDLNVLSQLNMFVKRKLPIRFGIVPLTPTKEATAITQILYYLLDSYGFDAFFEYLDTVVSESKTDKPSKAAFEKAIKDKELLAEATAVAFDDVMQSEGAQQVTKLAQHWAKRLNANTAVPPVFINGVPVPREGNWLQAMSVKAANDLQSMQRAVYLNMVDEEMWLPDFFIEKAVKRRNTYIYPEDDKSLRILDVNKIYTDHEGLFKNIPEVDALAESTKENWAVLTVVADVTSEEGANLLLGALAFRRNNPGVRLDFLHNPSDVSAASAVNAALKASDKLAEAESVADIKSTIEAAGSDTDALYAAALTNFLSFAAIKPGSSVLILNGRVVGPFTEEEPFQPDDFQYLLDFEQKSRILPVYAAVDELGLTDKISGPLAAAKITSVTALSTISDLPEGIFESAPSMRVSAYDTWNSTHTAIEIGNPETSSIHLVGLLNPASEQAQRWAPILKVVSELEGVYMKLFLNPKDKIDELPVKRFFRYVLESEPTFDEAGNVRALEASFEGLPSEALLNAGMDVPPSWLVAPKVSVHDPDNIKLSSIKTNVHASYELESILIEGHSREGKTSSPPRGAQLVLGTEKEPHFADTIVMANLGYFQFKANPGFCNIQLKQGRSSDIYTIDSIGAKGWTPVLGDEGTEVVLMDFQGTTLYPRLSRKPGQEDTEVLAETTEDNSIVGRGLKFAGGMLGKKTKSVSDEEHAEINIFSVASGHLYERMLNIMMVSVMKNTKHTVKFWFIEQFLSPSFKDFIPHLAEEYGFKYEMVTFKWPHWLRQQKEKQREIWGYKILFLDVLFPLSLDKVIFVDADQIVRTDMISLVNHDLEGKPYGFTPMCDSRTEMEGFRFWKQGYWANYLRGQPYHISALYVVDLRRFRELAAGDRLRQTYHSLSADPNSLANLDQDLPNHMQFQIPIHSLPQEWLWCETWCSDESQKDAKTIDLCNNPQTKEPKLDRARRQVPEWTVYDDEIAALDRKRKGGLPAEEAKKEEPVVEDKNTKSRNWEEPPAKETHVIDEL

SEQ ID NO: 16 - DNA, 4434 bp, Colletotrichum orbiculare
atggtgcgcccctaccagctaccaatgggcattgccctgacgctgttggctgcctccaatgtcgccgctgttccttctgttaccgtagacatgaaggcggccttcccgtctggcccctatcttcttgagctcttagaatctgctgctggtgaaaatgcgacctcgtacttccctctgctcgaccgcatcgcaagtggacactttagcgactccaagactgacaaggaggtttacgacaagttcctccaagttctccacgacgatggacacattacggcccctgaagctctttcgacattcaagatggcgctgtccttgcgaacagctgcccctagaatcgaggcccactaccagtattatcaaaccgctgtcgtgcccaagctcgaatccgacgcccaggacgattgtgaggtttgggccgaattagggggaaagcaatactgtactccgtctctggacgcgggtaaagacacgaaattgagcgaggcgaaagcgctgccattcgacaggactctcgggtcgggaaatgaagccgttctctacgcagatccgacttcgtcaagcttcggcgcattccacagcgctctggcacaaaaggctcgtcatggcgagttcgagtaccgactgcgctataccaagcctgcaaacagctacaaggagccacttcctgtgagtggttatggtgttgagctggccctgaaaagaaccgattacatcgtcatagacgatcgggaggcccacagcgatgattcgcaaaagaccgtcacgtcagagggtgttctagatgccgaggaagaggtggcggacttgaagcccctgtcaaagtctgagctcgagctgcttggcttgaaagccgcgtctttcattatgcagagtcaaaatcccttcgaagctttggtcagactttctcaagactttcccaaattctccacgtctattgccgcccacgatgtctccgagaacttcttgacggagcaccagcagaaccgccaacaactggtaccgagcggcatgaacgtactctggatgaacggtgtccagctcatcgaacgccagatcgaagctttcaccctcattgacattctccgtcgcgagcgtaagcttattgatggagtccgtgatctgggcttctctgggggacaggctgtatcgctcctgggccatcccaaggtcgccgattccaaggcggacgacgagcctcctcggtttgactggaccgatgacctcgaagaaggcaaggtcatcatcttccttaacgaccttgagaaggacgagagatacgcagagttcccgacgaacttgatgtcgctccttcagcgtgtctaccccgggcagcttcccccgatccgccgagacatcttcaacctcgtagttcccctcgacccgtccaacgcggatgatctcaacgttttgtcccagctcaacatgtttgtcaagcgcaagcttcccattcgcttcggcattgtgcccttgacccccacgaaggaggcgaccgccatcacacagatcctctactatcttcttgactcctacggctttgatgcattctttgaatatctggataccgttgtgagcgaatcgaagacggacaagcccagcaaggctgcctttgagaaggccatcaaggacaaggagcttctcgccgaggccaccgcagtcgctttcgatgatgtcatgcaatccgagggagcccagcaagtgaccaagctcgcccagcattgggcaaagagactcaatgccaacaccgccgttcctcctgtcttcatcaacggtgttcccgttccgagagagggcaactggcttcaggcgatgagcgtcaaggccgctaacgacctgcagtccatgcaaagagccgtctatcttaacatggtcgacgaggaaatgtggctcccggacttttttatcgaaaaggctgtcaagcgacgcaacacatacatttaccctgaagatgacaagtctctcaggatcttggatgtcaacaagatctacaccgatcacgagggtctcttcaagaacattcccgaagttgatgccttggccgagtctaccaaggagaactgggccgtcttgacggttgtcgccgacgtgacctctgaagagggagctaatctgctgctgggcgcgctggcattccgtcgtaacaaccctggtgtgcgactggacttcctgcacaacccgtcggatgtttctgcggcgtcggctgtcaacgctgcgctgaaggccagcgataagcttgccgaggccgagtccgtggctgacatcaagagcaccatcgaggcggctggaagcgacacggatgcgctttacgccgcggcactcaccaatttcctttcgtttgctgcgatcaagcctgggtccagtgtgctcatcctcaatggacgtgtcgtcgggcctttcactgaagaagagccattccaaccggatgatttccaatatctccttgacttcgagcagaagagccgcattctgcccgtatacgccgctgtcgacgagcttggcttgactgacaagatctctggcccactggcggctgccaagatcacatccgtcacggcgctctcaactatttccgatttgccggagggcatcttcgagtcggcaccatcgatgcgcgtcagcgcctacgatacatggaactcgacccacacagccatcgagattggcaaccccgagacttccagtattcacctggtcggtcttttgaaccctgccagcgagcaggcccaacgctgggctcccatcttgaaggtggtttccgaactggagggcgtttacatgaagctctttctcaatcccaaggacaagattgacgagttgccggtaaagcggttcttccgctacgtcctcgagtccgagcccacctttgacgaagcaggcaacgtgcgagccttggaagcatctttcgagggcctgccttcggaggctttgctcaacgccggcatggacgttcctccttcgtggctggtcgcccccaaggtgtctgtccacgacccggacaacatcaagctgagctccatcaagacaaacgttcatgcctcgtacgaactggagagcattctcatcgagggacactcccgcgagggcaagacctcgtctcctccccgtggcgcgcagctcgttctcggcacggaaaaggagcctcatttcgccgacaccatcgtcatggctaacctcggttacttccagttcaaggctaaccctggattctgcaacatccagctcaagcagggcaggagctctgacatttacaccattgacagcatcggcgccaaggggtggacgccagtcctcggagacgagggcacggaggtggttctgatggatttccagggaaccacgctctacccccgtctctcgcgcaagccaggccaggaagacaccgaggttctcgccgagacgaccgaagacaacagcatcgtcggccgcggcctcaagttcgccgggggcatgctcggcaaaaagaccaagtccgtttcggacgaggaacacgccgagatcaacatcttctccgtcgccagcggccacctctacgagcgcatgctcaacatcatgatggtcagcgtcatgaagaacacgaagcacaccgtcaagttctggttcattgagcagttcctctccccgtcgttcaaggacttcattccccacctggctgaagagtacggcttcaagtacgagatggtgacgttcaagtggccccactggctccgccagcaaaaggagaagcagcgcgagatctggggctacaagatcctgttcctcgacgtcctctttcccctctcgctcgacaaggtcatcttcgtcgacgcggaccagatcgtccgcaccgacatgatttccctcgtcaaccacgacctcgagggcaagccgtacggcttcacgcccatgtgcgactcgcgcaccgagatggaaggcttccgcttctggaagcagggctactgggccaactacctccggggccagccgtaccacatttctgcgctctacgtcgtcgacctccgccggttccgcgagctcgccgccggcgaccgcctgcgccagacgtaccactccctcagcgccgaccccaacagcctcgccaacctggaccaggacctgccgaaccacatgcagttccagatcccgatccacagcctgccgcaggagtggctgtggtgcgagacgtggtgctccgacgagagccaaaaggacgccaagacgattgacctgtgcaacaacccccagaccaaggagcccaagctcgaccgcgcccgtcgccaggtccccgagtggaccgtgtacgacgacgagattgccgccctcgaccgcaagcgcaagggtggtctgccggccgaggaggcaaagaaggaggagcctgtcgtcgaggacaagaacaccaagagccgcaactgggaggagccgcctgcgaaggagacgcatgtgatagacgagctctag

SEQ ID NO: 17 - protein, 1447 aa, Candida albicans
MSIARYIYYTIAVAVLLNIVKATENNNFKLELEASWSNIDFLPSFIEAIVGFNDSLYEQTIETIFGLGDTEVELEDDASDQEIYSTVINSLGLTDQDLDFINFDLTNKKHTPRIAAHYDHYSDVLTKFGDRLKSECAKDSFGNAVETKNGQIQTWLLYNDKIYCSANDLFALRTDLSSHSTLLFDRIIGKSKDAPLVILYGNPTEESTKDFLKILYPDAKAGKLKFVWRYIPSGIKKSNSISGYGVSLKMEKYDYSGAEGNPKYDLSRDFTRINESQELVSVNGKHSYELGVKLTSFILSNRYKTTKYDLLDTILTNFPKFIPYIARLPKLLNHEKVKSKVLGNEDIGLSQDSYGIYINGSPINPLELDIYNLGTRIKEELQTVKDLVKLGFDTVQAKLLIAKFALLSAVKQTQFRNGNTLMGNNENRFKVYENEFKKGSSEKGGVLFFNNIESDNTFKEYTTDREEAYLGVGSHKLKPNQIPLLKENIHDLIFALNFGNKNQLRVFFTLSKVILDSGIPQQVGVLPVIGDDPMDSLLAEKFYWIAEKSSTQEALAILYKYFESNSPDEVDDLLDKVEVPEDYKVDYNHVLNKFSISTASVIFNGVIYDLRAPNWQIAMSKQISQDISLIKTFLRQGPIEGRLKDVLYSNAKSERNLRIIPLEPSDIIYKKIDKELINNSIAFKKLDKAQGVSGTFWLVSDFTKSEIITQLIDLLLLLKKKAIQIRIINTGDTDVFGKLKTKFKLTALTNGQIDEIIEILKKSNASSANNDELKKMLETKQLPAHHSFLLFNSRYFRLDGNFGYEELDQIIEFEVSQRLNLIPDIMEAYPDEFRSKKVSDFNSVLSGLDNMDWFDLVTSIVTKSFHVDEKRFIVDVNRFDFSSLDFSNSIDVTTYEENSPVDVLIILNPMDEYSQKLISLVNSITDFSFLNIRILLQPRVDSKEEIKIHKFYRGVYPQPTPKFDSNGKWIQHYSAQFESIPSNVTYSTELDVPHKWIVVPQSSSMDLNTINFSESHSVDAKYSLKNILIEGYARDIHTGKAPDGLIFRAFNKNYSTDTLVMTSLDYFQIKGYPSIFNFSTTSNDTLLSASENKYQANTEELESIEVPVFKIDGSTIYPRVMKSGNNKPMSTRKHADINIFTIAGGQLYEKLTSIMIASVRKHNPSSTIKFWILEDFVTPQFKHLVELISIKYNVEYEFISYKWPNFLRKQKTKERMIWGYKILFLDVLFPQDLNKIIFIDADQICRADLTELVNMDLEGAPYGFTPMCDSREEMEGFRFWKEGYWSDVLKDDLKYHISALFVVDLQKFRSIKAGDRLRAHYQKLSSDPNSLSNLDQDLPNNMQRSIKIFSLPQNWLWCEMWCSDKSLEDAKMIDLCNNPLTRENKLDAAKRLIPEWIEYEQAIEPLVSLVQNNTAKEVVQEIEIDTDGEQEEQEQESNDDDFIHDEL

SEQ ID NO: 18 - DNA, 4344 bp, Candida albicans
atgtcaattgcaaggtatatctactacaccattgcggttgctgttttattaaatattgtcaaagctactgaaaataacaattttaaacttgaacttgaagcgtcatggagcaatattgatttccttcctagctttatagaggccatcgttggcttcaatgactctttgtacgaacagacaattgaaacaatttttggtttaggagacactgaagtggaattagaagatgatgcttcagatcaagaaatatattctaccgtgatcaactcattagggttaacagatcaagatttggattttattaattttgatttaaccaacaaaaaacatacaccaagaatcgcagcccattacgatcactattctgatgttctaactaagtttggcgatcgactcaaaagtgaatgtgcaaaagactcttttgggaatgcagtggaaacgaaaaatggtcaaattcaaacgtggttactatataacgataagatatattgttcggctaatgatttgtttgcattacgaactgatttgagttctcattctacacttttatttgataggattattggaaaatcaaaagatgcacctttggtgattttatatggaaacccgactgaggaactgactaaagattttcttaaaatattgtatccagatgcaaaggctggaaaattaaagtttgtatggaggtacattccactgggaatcaaaaaactgaactcaatttctggatacggtgtatcattgaaaatggagaagtatgattattctggtgcagaaggaaatccaaagtatgatttgagtcgagatttcaccagaattaatgagtcgcaagaattggtcctggtcaatggaaaacattcgtatgaacttggtgttaaattgacttcattcatattatccaatcgctacaagactactaaatacgaccttttagataccattttaaccaactttcccaagtttattccttacattgcacgattaccaaaattactaaatcatgaaaaagttaaatccaaagtgcttggaaatgaagatatagggctatctcaagactcctacggaatatatatcaacggttccccaataaatccactagagttagatatttacaatctaggtaccaggataaaggaggaattacagactgtgaaagatttagtgaaacttggatttgataccgtacaagcaaagctcttgatagcaaaatttgctttactttcagctgttaaacaaacacaatttcgaaatgggaatacattaatgggtaacaatgaaaatagatttaaagtgtatgaaaatgaatttaagaagggtagttcagaaaagggtggggtcttgtttttcaataacattgaatcagacaacacattcaaggagtacaccactgatcgtgaggaggcatatttaggagttggttctcataaacttaagccaaatcaaattccgttattgaaagagaacatccatgatttaattttcgcattaaattttgggaacaaaaatcaattgcgggtgtttttcactttatctaaggtgattttggactccggtatacctcaacaagttggagttttgcccgttataggagatgacccaatggatctgttactcgctgagaaattttattggattgctgagaaatcaagcacacaagaggcattagcaatattgtataaatattttgaatcaaacagtccagatgaagttgatgacttattagataaagtggaagtacccgaagattataaagtggattataatcatgtgttaaacaagttttctatatcaactgcttcggtcattttcaatggggttatttacgatttaagagcaccaaactggcagattgccatgagtaaacaaatatcccaggacatttcacttattaaaactttcttgagacagggaccaatagagggtagattgaaagatgttctttactctaatgcaaaatcagaacgcaatttacgtataattccattagaacctagtgacattatttacaagaaaatcgacaaggaattaataaacaattcaattgcattcaagaagctagataaagcgcagggtgtgtctggaacattttggctagtgtcggattttaccaagtcagaaataattactcaattgatagatttgttattgcttctcaaaaagaaagcaattcagataagaattattaatactggggatacagatgtttttggaaaattgaaaacaaagtttaaattaaccgccttaacaaatggacaaattgatgaaattattgagattttgaaaaaatccaacgcttcaagtgcaaataatgatgaattgaaaaaaatgcttgagactaagcaattacctgctcatcactcttttttgctattcaactctagatattttagattggatggaaattttggatacgaggaattggatcaaattatagagtttgaagtatctcaaagattgaacttaatcccggacatcatggaggcatatccggatgagtttaggtcgaagaaggtaagtgattttaatctggttttgtctggattggacaatatggactggtttgatttggtgacttccatagtgacaaaatcattccatgtcgacgaaaaaaggtttattgttgatgttaacaggtttgattttagctcattggatttttcaaactcgattgatgtaacgacttatgaagaaaatagtccagttgatgtattaataattttgaacccaatggatgaatattctcaaaaattgataagccttgttaatagcattacagattttctgttcttgaacattagaatcttactacaaccaagagtggatctgaaagaagagatcaaaattcacaagttttatcgtggtgtgtatcctcaaccgactcccaaatttgattccaatggcaagtggatccaacattattcagctcaatttgaaagtattccatccaatgtgacctattctactgaattagatgttccacataagtggatagttgttcctcaactgagttcgatggatttaaacacaatcaatttcagcgaaagccactctgttgatgcaaaatactctctaaaaaatatattaattgaaggatatgctagagatattcatactgggaaggcccctgatggtttaatctttagagcctttaataaaaattactcaactgatactttggtgatgacttccttggactattttcaaatcaaagggtatcctagtattttcaactttagtacgacctcaaatgacacattattgtctgcatcggaaaacaaatatcaggctaataccgaggaattggagagcattgaggtgccagtttttaaaattgatggatcgaccatatatccaagggtaatgaaatctggcaacaataagccaatgctgacgagaaaacatgcagatataaatatttttacaattgctggtggccaactttatgaaaagttaactagcattatgattgcgtcagtaagaaaacataaccctagcctgacaataaaattctggattttggaagattttgtgaccccacaattcaaacacttggtagagcttatctcaataaagtataatgtcgaatatgagtttattagttacaaatggcccaatttcttgagaaaacagaaaaccaaagaaagaatgatttgggggtataagattttgtttttggacgttttgttcccacaagatctcaacaagattatattcattgacgccgatcaaatatgtagggcagatttgacagaattggttaacatggatcttgaaggtgctccatatggatttactccaatgtgtgattctcgggaagaaatggaaggtttcagattttggaaagaaggatactggtccgatgttttgaaggatgatttgaaatatcatattagtgcattatttgttgttgatttgcaaaagttcagatctataaaagctggagacagattgagagcacactatcaaaagctttctagtgatccaaattcgttgagcaatttagatcaagatttgcccaataatatgcaaagactgataaaaattttcagtttgcctcaaaattggctctggtgtgaaatgtggtgctcagataaaagcttggaagatgcaaaaatgattgatctttgcaacaatccattaactagagaaaataaattagatgctgctaagagattgatcccagaatggattgaatacgagcaagcaattgaaccattggtatcattagtacagaataataccgccaaagaagttgttcaagagatagaaattgatacagacggagaacaagaagaacaagaacaagaaagtaatgatgatgattttattcacgatgaattgtaa

SEQ ID NO: 19 - protein, 1326 aa, Candida glabrata
MKYWLLLFLQLTVVRSMAVVVNERAQVWTLLSWLGGNKHEILTGLYPLVSGVDEQAVGAGKLAQECRDIVKGKYNDPDFAALFYKFAQEYPMGYLNDYGVQPGSNFVVLNGENYTEPDKIYYFKSGDLAAQAAVEDATIIDSHDVVIGDATNSDGERLPLVIFYGCPDNEDEYEQFSRTLYLEATENKKLRYVWRSTCVPQKSQDENKFPVGITVTGLQTIENVLNSGIELDLPDRVAQPKAKDLENLVVEELEKLDYKLISAISVFFSTTGHNFVETFKYAKKLCNSLPLIMPQMLKIKEFDTYINESNKSLKKNNIDHNMLGLYVNGQYLKITQTYINSLLHVLRTELDFITGIHETLKKAIPDVSLQNVKRLMDLFSMSSIPNLSFLQPVKVDTHRIQGFSESVIYFNDIEKDIQYEDFSENVEVFFKESKYGILPEFKQNWNELVFVIDFDKIEADVDAREALGGMLRAIQIVQNGYPQRIGLIPFSSSGNKRIIRKIYELKSKKNLEDVVDYLQDILELNFGRESNFKKLPDYDHVRKELSINSTSIIINGNIFPFRKNTWNYLVSHVMKKDVTYIKEELGKLNKQTADDVDIRGLLHLKSLSKRNTKFIKDYFIEAAYTRVNESFLKEISNRVIQNINDTGHNIIHTITLIDDFNTENALIRLKNIVGVKFNGLKFRVIHTGDIGSSSCWNKFYQGKNIVNEVSKIKLNNKCKSSNGVGKYRLPILTKVLPDVSFSELSNGPLLLVNGRVSLMNEEDIPTISDIESLLVHESKRTIDLLYNLEEVFPDFSEKTIEPEFIESLSSFMTKMFYHGANSIEGSLPFSTETSVPRMNLRSLFVANNITTFRQHADEKPVDITLIVDPVEERSQKFLTLANQVMDLPFVNINLILYCTQNITLVPNNRIYFENMSSTTVLKSGGFEYTLDKPWYVRTDEHDKLSGHVLEVHNYAADQMVTIGIVEGERDVCLMLRDSKGNIIDKTTTMRTYGFAELTIPNLGDSYVVESCDSRYRVDSYELNAKSDYTPTDRIHWRTNLPNSLFVKVSKVKEKKEINPDTETVNFFTTIANHEEEEQMKETMLKIIATTGERPVTFYIWDEPSITESFRDYGRLLNKLLPGREIHVEFVKYEWPPWLRPQRFRQKRLAISKLLFLDLLFPSNVSKVLLIGPNMDTYNLTSVYDMTLKRAIAMPKAQGKGYWSEGHWAEKIQKHSLVFHSVEPFILVDLDVLRSLGGGDYLRIHYQQVSADIKSLEVIDQDLLNDIQIEMPIRTLRKSALKTVEVSTREMKKLKSKLIALENDPIDVPESKSKGEDEEQQYFDDEL

SEQ ID NO: 20 - DNA, 3981 bp, Candida glabrata
atgaagtactggttgttgctgtttttgcagttgactgtggtgcgttccatggccgttgtggtcaatgagcgtgcgcaggtgtggacgctattgagctggcttggtggtaataagcatgagattcttacaggtctgtacccgctggtctctggtgtagatgagcaagctgttggcgctggaaagttggcacaagagtgtcgcgacattgttaagggtaaatacaatgaccctgattttgcagcattgttctacaagtttgctcaggagtatcccatgggttatctcaacgattatggagttcaaccagggtctaattttgtggttctcaatggtgaaaactacaccgaacctgacaaaatatactatttcaaatcaggggatcttgctgcgcaggctgcagtagaggatgccacaatcattgactcccatgatgttgtaattggagatgccactaactcagatggtgaaagactgccattggtcatattctatggttgtcccgataatgaggatgagtacgaacagtttagtagaaccctttacctcgaagctactgaaaacaagaaactgagatatgtctggagaagcacatgcgttccgcaaaagtcacaagatgagaacaaattccctgttggtatcacggtaacaggcttgcaaacaattgagaatgttttaaactcaggaattgaattggatcttcctgaccgtgttgctcagccaaaagcaaaggatttagaaaacctggtggttgaggagctggaaaaactagattataagctgattagtgccatctctgtattcttttcaactacaggtcacaattttgttgaaacttttaagtatgccaaaaagttgtgtaattcattgcctctgatcatgccacaaatgctaaagataaaggaatttgatacatatatcaatgaatctaataagtctttgaaaaagaataatattgaccataatatgcttggtctttacgttaatggacagtatttgaagatcactcagacatatataaatagcctgttacatgtcttgaggactgaacttgacttcattactgggattcatgaaacattaaagaaagctatccctgacgtttctcttcaaaatgtgaaaaggttaatggacttattctctatgtcctctattccaaatctgtcgtttttacagcctgttaaagtagatacccacagaattcaaggtttttctgaatctgtgatatatttcaacgacatagaaaaagatattcaatatgaagacttcagtgaaaacgttgaagttttcttcaaagaatccaagtatggaattcttccggagtttaagcaaaactggaatgaattggtctttgttattgacttcgataagattgaggccgatgttgatgctagagaagctcttggagggatgttgagagcaattcaaattgtacaaaatggttaccctcaaagaattggtttgatcccattttcatcctctggaaataaaagaattataagaaagatatacgaactaaaaagtaagaagaacttggaggatgtagtagactatttgcaagatattttggaactaaacttcggtagggaatcgaattttaaaaaacttcctgattatgatcatgttagaaaagagctgtcaattaactcaacttctatcatcatcaatggaaatatcttcccattcagaaaaaatacttggaactacttggtttcacatgttatgaaaaaggatgtaacttatattaaagaagaacttgggaaactaaacaagcaaacagctgatgatgttgatattagaggactccttcatttaaagtcgttatcgaagagaaatactaaatttataaaggactattttattgaggctgcttatactagagtgaatgaatcctttttaaaagagattagtaatcgtgttatacagaatattaacgacactggtcataacataattcatacgataactctgattgatgacttcaataccgaaaatgccttaataagattgaagaatattgtaggtgtcaaatttaatgggttgaagtttagagttattcacactggggatattggaagcagctcctgttggaataaattttatcagggtaagaatattgtcaatgaagtttcaaaaattaaattgaataacaaatgcaaatcttctaatggcgtaggcaagtatcgcttgcctattttaactaaagttttaccagacgtcagcttttctgaattgtccaacggtccacttttattggttaatgggagggtcagccttatgaatgaggaggacattcccaccatatcagatatcgagtctctcttagttcatgaaagtaaaagaacaattgacttactatataatttggaagaggtgtttccagatttttcagagaaaactattgaaccagaattcattgagtctctatcatccttcatgacaaaaatgttttatcatggagccaactcgattgaaggttctcttccattctcaactgagacttctgttcccagaatgaatttgagatctttgtttgttgctaataatattaccactttcagacaacatgcagacgaaaagcctgtcgatattactttgattgttgatcccgttgaagaaagatcacaaaagtttttgacattggccaatcaagtcatggatttaccgtttgtaaatatcaacctgatattatattgtactcagaatattacacttgtcccaaataacagaatatatttcgaaaatatgagtagcacgacagtattgaagagtggcggatttgaatatactttggataaaccatggtacgttagaactgatgagcatgataaattatctgggcatgtattggaagttcataattatgcagcagatcaaatggtgacaattggaatagtagaaggggagagagatgtttgtttgatgctacgtgatagtaaaggtaacattattgataagacgaccacgatgcggacttatggttttgcggaattgactattccaaaccttggagattcatatgttgttgagtcctgtgacagtagatatcgtgtcgattcgtatgaattgaatgcgaaatctgattatacgccaactgatagaattcattggagaacaaatttaccaaactctctctttgtcaaggtcagtaaggtaaaagaaaagaaggagattaacccagatacagaaactgtgaatttttttactaccatagctaatcatgaagaggaggaacaaatgaaggagactatgttaaagataatagctaccaccggggaacgtcctgtcaccttctatatatgggatgaacctagtatcacagagtcattcagagactatgggcgtttgctgaacaaactattacctggtagagaaattcacgtggaatttgtaaaatacgaatggccaccctggttaagacctcaacgttttagacaaaagagactggctatttcgaagttgctatttttggacctattattcccatccaatgtctctaaagtgctattgataggtccaaacatggatacctacaacttaacctctgtttacgacatgactttgaaaagagctattgcaatgccaaaggcacaaggtaagggttattggagtgaaggtcactgggcagagaaaattcagaagcacagtttagtcttccactccgttgagcccttcattttggttgatttagatgttttgagaagcctaggtggtggagactacttgagaatccactaccagcaagtctctgcggatatcaaatccctagaagttattgaccaggatttactgaacgacatacagatagaaatgccaatacgtactttgagaaagagtgccttgaagactgtagaggtaagcacaagagaaatgaaaaagctaaagagtaagctaatcgctctagagaacgatcctattgacgtacctgagagtaaatccaagggtgaagatgaagaacaacaatactttgacgacgaattatag

SEQ ID NO: 21 - protein, 1440 aa, Candida orthopsilosis
MIPWQWITKLSFTICIFSILGSADSARSLTIDVKAPWKKVDFVSNFIESIAGFNSSLYVPTLEGIFGLGESDEVEGRSDRDIYEHLLNQLQLEPTTIDFINFNLVNKKYSARVASHYAHYEMVIEQFGERLKKACAHDSFGNVVETKNGLVPAWVLYNDKIYCSVNDLFALQTDKSNQETFLFDRIIGHNDESPLLAFYGDPTVDQTKGFLKVLYEEARNGKLRFVWRYIPSFSKQLDSLPGYAVELPFRDAEYSPQFRKDLNKDFDLIKGSTAISKVGEDVNDLGIKLTSFILSNRVKSTKFELLQTLVNNLPKFYFYLNKLPQSANYKKVKSKVVGNEQMGLSKESFGIYINGSPIHPLELDVYKLADKIKEELSMIQDLIKHGFNSVQAKLLLSKFGLLSAVKQAQFRTGNTLMGNNENRFKVFQHAFNRKDSSKGGVVFINDIESDSNYGEYSTDRQEVYLGVESRKLKPNQIPPLKENIHDLIFALNLASKKQLKAFFKFSKIILDSGIPQQIGIVPIIGEDPLDEQLATRLYHITGLSDQKEALALLYKYMESSGPDEVHDLLEKVNIPSGFVVDFDTVLNKFSIESPSVIVNGVIHDLFASNWQIAMSKQIEQDNALIKSQLRSGDMNGSLKDILYNNAKSERNLRIHPLDPSEIIYKRIDHDLMRSSIAFKKIDKELENHATIWLVSDFSNSKMVDQLINLLNLMRRRSIQIRVVNVGNSEMFSKLVEKRRLNALTNAEINGIISSLKESELSTGLDEEILHVLEEKHLPVRHSYLLVNSRYIRLDPVILSVDELSQLIEYELSQRLRLMNEVALTYVDEFPQALYEYNSVVSGIDDMDWFDLVSSIITKSFHVDDKTFINDVNRFDFGSLDMSNSIDYEKYDESKLVDVLVIIDPLEKKPQKLINILDAVKDFSFVNVRVLLQPKLEYKREELNERFYQGVFPPSVPQFEDSGYWNDKYLANVVSLPLAIYSINMDVPKRWVVIAKSSPSDVDIGSFKSNKSPISLSFELSNLLIEGNARDIHTGKAPKNLQLQISNGTHSDDTLVMTALNYFQLKALPGVHLLSVESNHSLLSASDNKFDPNVAEIDAVPVSMFSLDGVALQIRTTSRKEKVDQKTKHADINIFTIAGGHEYEKLVGIMIASVKKHNPRKSIKFWILNNYISPQFRALVPLLVKKFDIEIELVTYKWPNFLRKQSSKQREIWAYKILFLDVLFPQDLDRVIFIDADQICRTDLGELVNMDLEGAPYGFTPMCESNKETEGFRFWMSGYWSEVLQDDLKYHISALYVVDLPKFKSIEAGNRLRAHYQKLSSDPNSLSNLDQDLPNNMQRQIKIKSLPQEWLWCETWCSSDTFNEAKMIDLCNNPLTKENKIDTAKRLIPEWVEYEKEVLALIDQTDDILKEEEEEKKDLTIDDNLHGDEVTDDDDFYHDEL

SEQ ID NO: 22 - DNA, 4323 bp, Candida orthopsilosis
atgataccgtggcaatggattactaaactactgttcactatatgcattttcagtatactcggctctgcagatagcgccagatccttgacaattgatgtgaaagctccttggaaaaaagttgacttcgtgtcaaatttcatagaaagtatagcaggttttaattcatcgctatatgtacctaccttagaaggtatctttggtcttggcgaatctgatgaagttgaggggagatcagacagagatatatatgagcacttgttgaatcaattacaactagagcccactacaattgactttatcaacttcaatcttgttaacaaaaagtattctgcacgggtggcttcacattatgctcactatgaaatggtgatagaacagtttggggagagacttaagaaagcatgtgcccatgattcgtttggtaacgtggttgaaaccaagaatggacttgtacctgcgtgggtcttgtacaacgataaaatctattgttcagtgaatgatttatttgcgctccagactgataaatcgaatcaagagaccttcttgtttgataggataattggccataatgatgaatctcctttgttggctttttatggcgaccccacagttgatcaaacaaagggatttctaaaagttttgtacgaagaagctcgtaatggaaaattgaggtttgtttggagatatatcccactgtttagtaaacaattggattcattaccaggttatgcagtagagctaccttttagagatgccgaatattcgcctcagttcaggaaggacttgaacaaagattttgatttgataaaaggttcaaccgccatttcaaaagttggtgaagatgttaatgatttaggtatcaagcttacctcttttattttatctaacagagtcaaatcaacaaagtttgaattgctacagacattagtgaacaatttgccgaagttttatttttacttgaacaaattaccacagctggcaaattacaaaaaggtcaagtcaaaggtagtaggaaacgaacaaatgggactatcgaaagaatcatttggaatttacattaatggctccccaattcatccattagagttggatgtgtacaaacttgcagataaaattaaagaggagttatccatgatacaggatctcatcaaacatgggttcaactcagttcaagcgaagctccttttatccaagtttgggttactttctgcggttaaacaagctcaatttagaactgggaatacattgatgggcaacaacgaaaacaggttcaaggtattccaacacgctttcaatcgcaaagactcatctaagggtggtgttgtattcataaatgatattgaaagtgatagtaattatggagagtactcgacagaccgccaggaagtttatcttggtgttgagtctcgaaaacttaagcccaatcaaatacccccactaaaggagaacatccatgatttgatatttgcattgaacttggcaagcaaaaagcagttgaaggcatttttcaaattttcaaagattatattagattcgggtatccctcagcaaattggtattgtgccgatcattggcgaagatccattagatgaacagcttgccacgcgtttataccatattaccgggctactggatcaaaaagaggcgctagctttgctctataaatatatggaatcatctggtcctgacgaggttcatgacttactagagaaagtaaacataccttctggatttgtggttgactttgatactgtattgaataaattttcaatagagctgccctctgttattgtcaatggggtaattcatgatctttttgcatccaattggcaaattgctatgagcaaacagatagaacaagataatgcacttattaaaagtcaattgagactgggtgatatgaatggcagcctcaaagacattctatacaataacgctaaactggagcgaaacttacgtattcatccattagatccaagtgaaattatctataaaaggattgaccacgacttgatgaggtcttcaatagcttttaagaaaattgataaagagttggagaatcatgctactatatggttggtctctgactttagcaatagcaaaatggtggatcagcttattaatttattgaaccttatgaggcggagatcgattcagataagggtcgtcaacgttggaaactcagaaatgttttcaaaattagtggaaaagaggaggttgaatgcgttgacaaatgccgaaattaacggtataatatctctgttgaaagagtctgagctatcaactggcttagatgaagagattttgcatgtattggaagaaaagcatttaccagtaagacattcatatttattggtaaactcaagatacatcagattagatcctgtcattttgagtgtagacgagttgtcacaactaatcgagtacgaactaagccaaagattaaggcttatgaacgaagttgccctcacatatgttgatgagtttccacaagccttatatgaatacaacctggtggtatctgggatagacgatatggattggtttgacttagtatccagtataatcacaaaatcatttcatgttgatgacaagacattcatcaatgatgtaaaccgatttgactttggttccttggatatgtcaaatctgattgactatgaaaagtatgatgaatcaaaactcgtggatgtattggttatcatcgatccccttgagaagaagccccagaaactaatcaatatactcgatgcagtcaaggacttttctttcgttaatgtgagggttttacttcaaccaaaacttgaatacaaacgggaagaattaaatgaacgattttatcaaggtgtatttcctccttccgtgccgcaattcgaagatagcggttattggaatgataagtatttggcaaatgttgtttcacttccactagctatatattctatcaacatggatgttcccaaacgttgggtagtgattgcaaagagctctccgtcggatgttgatatcggcagttttaaatcgaataaaagcccaatatcgctttcctttgaattgtctaatttacttattgaaggaaatgctagagatattcacaccggtaaagcacctaaaaacttgcaactacagatctccaatggaacacattctgatgataccttggttatgacagcattgaactattttcaattgaaagcattgcctggtgtccaccttctcagtgttgagtcaaaccactcgttgttgtctgcctcagacaataagtttgatccaaacgttgccgagattgatgctgttccagtatccatgttttcattggatggtgttgcacttcaaataaggactacctcgagaaaggagaaggttgatcagaagaccaagcatgcggatatcaatattttcacaattgccggtggtcacgaatatgagaaacttgtcggcatcatgatagcctcagtgaagaaacacaacccaaggaagctgatcaagttttggattttgaataattacatctctcctcaattcagagcattggttccacttttggttaagaagtttgacattgagatcgagttggtaacatacaagtggcctaattttttgcggaagcagagtagcaaacaaagagaaatctgggcttacaagatactatttcttgatgtccttttcccccaagatcttgatcgtgttatattcattgacgctgaccaaatatgtcgtactgatcttggagagttggtgaatatggatctagaaggagcaccttatggttttactccaatgtgtgaatctaacaaagaaactgagggtttcaggttttggatgctgggatattggtctgaggtattacaagatgacttgaaatatcatattagtgccttgtatgttgttgatttacctaagttcaaatctattgaagcagggaatagattgcgtgctcactatcaaaagttatccagcgatccaaactcattgagtaatttagatcaagatttacccaataacatgcagaggcagatcaagatcaaaagcttgccacaggaatggctttggtgtgaaacatggtgttcaagtgacacgttcaacgaagcaaaaatgatcgatttgtgtaataatccgttaactaaggagaacaagattgacaccgcaaagaggttgattccagaatgggtagagtacgaaaaagaagtgttggccctaatcgatcaaacagatgatattctcaaagaagaagaagaggagaagaaggaccttactattgatgacaatttacacggtgacgaagttacggacgacgatgatttttaccatgatgagttgtag

SEQ ID NO: 23 - protein, 1453 aa, Candida parapsilosis
MACKWSVSFFKIMIPWQWTTKVLLIVSTFSIYSSANDTGLLTVDVKAPWKRIDFVSNFIESIAGFNASLYIPTLEAIFGLGDSDVSEGRTDKEIYDYTMKQLSLEPSAIDFVNFNLVYKKYSPRVASHYFHYETTLQQFGDRLKTECTKDSFGNQVETKNGLVPAWVLYNDKIYCSVNDLFALQTDKSNQETFLFDRVIGDSDDAPLLTFYGDPTVDQTREFLKVLYEEAQNGKLRFVWRYIPSVSKRVDSLPGFAVEVPTKNIEYYAHSKLDLNKDFDTIKSSRAISKIGNNVNELGIKLTSFILSNKIKLSKFELLQTILNNMPIFYSYLNKLPQSINYKKVQSKVVGNEQVGLSKESFGIYINGSPIHPLELDVYKLYDKISDELSTVKNLVELGFNSVQAKLLLAKFGLLSAVKQAQFRTGNTLMGNNENRFKVFQHAFNRNDATKGGVVFINDIESDRNYGEYSTDRQEAYLGVESRKLKPNQIPPLKENVHDLIFALNLASKKQLKAFFTFSKIILDSGIPQQVGVLPIIGEDPLDEQLAIRLYHITKLSDQKEALALLYKYMESTGPDEIQELLKKVDVPTNFRVDFDTVLNKFSIDQPSVVVNGVIHDLFSSNWQVAMSKQIEQDNSLIKTQLRQGDVNGNLKDIIYNNAKSERNLRIHPLDPSEIIYKKIDHDLMRSSIAFKKVDKELNNHATIWLVSDFRDSKMIDQLVTLLNLMKRKSIQVRVFNVGNTKLFSKLAGKMRLTVLTNADINAIISTLKEGGEVSTGLNEDLVHSLEQKHMPVRHSYLLVNSRYFRLDPVILNMEELSQLIEYELTQRLRLINEICVTYVDEFPQALYEYNSMGSGLDDMDWFDLVSSIVTKSFHVDDKTFVNDVNRYDFGSLDMSNSIDYKKHDESKQVDVLVIMDPLEDNSQKLINILDAVKDFSFVNVRALFQPKLEYAREELTERFYQGVFPPSIPYFEGSGKWDDTFLATFDALPVATCSINMDVPKRWVVVAKSAPSDIDLNSFKLDKNPISVSFEITNLLIEGNARDVNTGKAPNDLQLQISNGTHTDNTLVMTALNYFQLKALPGVHSLSVKSNHSLLSASDNKFDPNIVEIETAPMSLFSLNGLVLQIRVSSNRERIVEKSKHADINIFTIAGGHEYEKLVSIMIASVKSHNLKKSIKFWILSNFISPQFKVLIPHLIEKYSVEIELVTYKWPTFLRKQSNRQREIWAYKILFLDELFPQDLDRVIFVDADQVCRTDLTELVNMDLEGAPYAFTPMCESNKETEGFRFWKSGYWAEVLQDDLKYHISALYVVDLSKFKSVEAGNRLRAHYQKLSSDPNSLSNLDQDLPNNMQRQIKIKSLPQEWLWCETWCSSETFNEAKMIDLCNNPLTKENKIDTAKRLIPEWVNYEKEVLALIDQVTDTVEEEVEEDEENFTIDESHGEVDSDDDALYHDEL

SEQ ID NO: 24 - DNA, 4362 bp, Candida parapsilosis
atggcttgcaaatggtctgtttctttcttcaaaattatgataccatggcaatggacaactaaagtgctactcatagtatccacctttagcatatacagttcagcaaatgatactggtttattgacagtcgacgtgaaagctccgtggaaaagaattgatttcgtatccaatttcattgaaagtatagcgggattcaatgcatcactatacataccaaccttggaagctatctttgggcttggagattcagatgtaagcgagggaagaacagacaaggagatatacgattacactatgaaacagctttcactagagccaagcgcaattgactttgtaaatttcaaccttgtctataaaaaatattctcctagagtggcttcacattactttcactatgaaacgacattacagcaattcggagataggttgaaaacggaatgcaccaaagactcgtttggcaatcaggtggaaacaaagaatggacttgtgcctgcgtgggttttgtacaatgataaaatatactgttcagtaaatgatttatttgctctccagactgacaagtctaatcaagagacttttctttttgacagggtaattggtgatagcgatgatgcaccattattgacgttttatggtgaccccactgtggaccaaaccagggagtttctcaaggttttgtatgaagaagctcagaacggaaaattgagatttgtttggagatatatcccttcggttagtaaacgtgtggattcactacctggctttgcagtggaggttcctacaaaaaatatcgaatattacgctcattcaaaacttgatttgaataaggacttcgatacgataaagagttcaagagctatttcgaaaattggcaataacgtcaatgaattgggtattaagctcacttcatttattttgtccaataagatcaagttatccaagtttgagttgctacagacaatattgaacaatatgccaatattctattcctatttaaacaagctaccacaactgattaattacaagaaggtacaatcaaaagtagtgggcaatgaacaggtaggattatcgaaggaatcgtttgggatctatataaatgggtcaccaatacatccattggagttggatgtgtataaactctatgataagattagtgatgaattatctacagttaagaatctcgttgaattagggttcaattcagttcaagcgaaactccttttagctaagtttggattactttctgctgtgaaacaagctcagttcaggacgggaaatacattgatgggcaacaatgaaaaccgattcaaggtattccaacatgctttcaatcgcaatgatgccacaaagggtggcgtagtgtttataaatgacatcgagagtgatagaaactacggcgagtattcgacagatcgccaggaagcctatcttggagtagagtctcgtaaactcaagcctaaccaaatccctcctttgaaagagaacgtgcatgatttgatatttgcattaaatttggcaagtaagaagcagttgaaggcttttttcacattttcaaaaattatactagattcaggtatccctcaacaagttggtgtcttgccaatcattggtgaagatccactagatgaacaacttgccattcgtttataccatattactaaacttctggaccaaaaagaggcacttgcattgctttataagtatatggagtccacgggaccagatgaaattcaagaactattaaagaaggtagacgtgccaactaatttccgggtggattttgacacagtattgaacaaattttcaattgaccaaccctcagtcgttgtgaatggagtaatccacgatcttttttcgtccaattggcaagtagccatgagcaaacaaatcgaacaagataactcactcataaagactcaattgagacagggtgacgtgaatggcaatctcaaagatataatctacaacaatgccaagctggagcggaatctacgtattcatccattggaccccagtgaaatcatttacaaaaaaattgaccatgatttaatgaggtcatcgatagctttcaaaaaagttgataaagagttgaataaccatgcaactatttggttggtgtcggatttcagagatagcaagatgatagatcagcttgtgactttattgaacctcatgaaacgaaagtcaatacaggttagagtgtttaacgtagggaacacaaaattgttttcaaagttggctggcaaaatgagattaacagtcttgacaaatgcagatataaacgccatcatctccacattaaaagagggaggggaagtatcaaccggtttgaatgaagaccttgtacatctgttggaacaaaagcatatgccagtaagacattcatacttgttggtgaactcaaggtacttcagattggatcctgtaatattaaacatggaggagttgtcgcagctaatcgagtacgagctaacccaaaggttacgccttataaacgaaatttgtgtcacgtacgtagatgaattcccacaagctttatatgaatacaatctgatggggtctggattagatgacatggattggtttgacttagtttcaagcatagtgacaaaatcgtttcatgttgatgacaagacattcgtcaatgacgtaaacagatatgactttggttccttggatatgtcaaatctgatagactataaaaagcacgacgagtcaaagcaagttgatgtgttagttatcatggatccccttgaagataactcgcagaagctcatcaatatacttgatgctgtcaaagacttttcttttgtgaacgtgagggctttatttcagccaaagctcgaatacgcacgagaagagttgacagaacggttttatcaaggcgttttccctccttctattccatattttgaaggaagtggaaaatgggacgacacatttttggcaacttttgacgcactccctgtggctacatgttccattaatatggatgtccctaaacgttgggttgttgttgcaaaaagtgctccatcagatattgatctcaacagtttcaaattggataaaaaccccatatcagtgtctttcgaaataaccaatttactcattgagggaaatgctagagatgtgaacaccggcaaagcccccaatgacttacaactacaaatttccaatggaacccacacagacaatactttggtaatgacggctttaaactactttcaactaaaggcattacccggtgttcactccctcagtgtcaagtccaatcattcgttgttatctgcctcggacaacaaatttgatccaaatatcgtcgagattgaaacagccccaatgtctttgttctcgttaaacggtcttgtgctccaaataagagtcagctcgaacagagaaagaattgttgaaaaatcaaagcatgcggatattaatatcttcaccattgcaggaggccatgaatacgaaaaacttgtcagcataatgatagcatctgtgaagagtcacaacctaaagaaatcgatcaagttttggatcttgagcaatttcatctctccacaattcaaagtattgattccacatttgattgaaaagtatagcgtcgaaatcgaattggtcacctacaagtggccaacctttttgcgaaagcagagtaatagacaaagagaaatttgggcttacaagatactattccttgacgaactatttccacaagatcttgatcgtgtgatatttgttgacgcagatcaggtttgtcgtaccgatctcactgagttggtaaacatggacttagaaggtgctccgtatgctttcactccaatgtgtgagtccaataaagaaacagaagggtttagattttggaaactgggttattgggctgaggtattacaagatgatttgaaatatcatatcagtgcattgtatgttgttgatttgtccaagttcaaatcggttgaagcaggtaacagactacgcgctcactatcagaaattatccagtgatccgaactcactaagcaacttagatcaagatttgcccaacaatatgcagagacaaatcaagatcaaaagtttgccacaagagtggctttggtgtgaaacgtggtgttcaagtgaaactttcaatgaagctaagatgattgatttgtgcaacaacccattgactaaagaaaataaaatcgacaccgcgaagagattaatcccggagtgggtaaattatgaaaaagaagtgttagctttgattgatcaagtaacggataccgttgaagaagaggttgaggaagacgaagaaaacttcactattgatgaatcgcacggtgaggtagactccgatgacgatgcactctaccatgatgagttgtag

SEQ ID NO: 25 - protein, 1451 aa, Candida tropicalis
MMSMKCISTFLAFCLLSTTVNAFLNNNLSIQLDAPWQKIDFLPSLIETVASYNSSLYYTTIETIFGLDDSDNDFDEDSSDKNIYEQICKNLDKYTKSFVDFDLINKKHGARVVSHYDHYQQVLSRMGDRLQKECEYDSFGNEVKKKNGQLQTWLLYNDKIYCSANDLFALRTDTSKEKTLLFDRVFGDNEEAPLLVLYGNPVEESTKEFFKVLYPDAMAGKIRFVWRYIPTFRKRQDTLPGYGVSLNMKNYDYGNGEKTSNFDLNKDLHKINDSGILIPVPEKNRDELGIKFTSFILSNRYKIHKYELLSTLLNDFPKFIPYIAKLSKSFNYEKVKTKVTANQDIGMSDESYGIYINGSPIHGLELDIYKLGNKIREELETIQNLVKLGFDSIQAKLLLTKFALLSAVKQTQFRNGNTLMGNNENRFKVYQSEFEKGNPGKGGVLFFNNIEVDVTFSEYTTNREEAYLGVSSYKLKPNQIPPLKENIHDLIFALNLANKSQLRVFFTIAKVILDSGIPQQIGLIPVIGDDPLDKEIARKFYYIAENSNTPEALALLYKYFDSANSDEAAAILNQVKVSKNFDVDYNYVLDKFSITEASVIFNGVIYDLRSPNWQIAMSKQISQDVSLIKSFLRQGPVEGKLKDKLYSNAKEKRNLRVIPLEPSEIIYKSVDTELLNESIAFKKIDKEDGVSGTFWLVSDFTKVEMFNQLIDLLSFLKKKPIQVRVVNTGDSKVFKSLHKNYKLTTLTNSQIEEIIEVLEDAELSKYDNPEVKRLLERKHLPSHHSFMLFNSRYFRLDIPLEPTELEELLEYEFTQRLNLFNDILYAYPDEFESKKLNEFNSLVSGLDSMDWFDLVSSIVTKSFHVDEKMFISDVNRFDFSSLDLSNSIDVSVNKEENPIDILVIMNPMEEYSQKLLSIVNSIKTFPFVNIRILLQPKVVSNEEIRVHRFYRGVYPSSDIQFDENTGIVVENNIAEFHNLPVDTRLSTELDVPTKWIVVSKSSSTDLDNVAFNKVVKSVNGKFLLKHILIEGFARDIHTGRTPDGLSFKLVHNNITTDTQVMSSLDYFQLKAIPGISLLSSNPEYNLLSASENKYDFNHDSLDEVEVPVFSLDGVTLYPRISKGDGITKYSNRHADINIFTIAGGSLYEKLASIMIASVRKNNPESIIKFWILENYITPEFRQLMQLISKKYTVQYEFINYKWPKFLRNQKSKERTIWGYKILFLDVLFPQDLDNVIFIDADQTCRSDLTELVNMDLQGAPYGFTPMCDSRKEMEGFRFWKQGYWSDVLKDDLQYHISALYVVDLKQFRSIKAGDRLRAHYQKLSSDPNSLSNLDQDLPNNMQRQIKIFSLPQNWLWCETWCSDESFRDAKMIDLCNNPLSKENKLDMAKRLLPEWVEYEKEIDELVSNLKEISSSVEDDENEEMEDDSILFEDTGFDEEEEEEEEDYHDEL

SEQ ID NO: 26 - DNA, 4356 bp, Candida tropicalis
atgatgtctatgaaatgtatatccacattcctagcattttgtttgttgtccactacggtcaatgcatttttgaacaataatttgtcaattcaattggatgcgccatggcagaaaatcgactttcttccgagtttgattgaaaccgtggcatcttataattcatcattatattacacaaccattgaaacgattttcggactagatgattcagacaatgattttgatgaggatagttccgataagaatatatatgaacagatttgcaaaaatcttgataaatacactaaaagttttgttgattttgatttaattaacaagaaacatggtgcaagagtagtatcccattatgatcattaccagcaggttctttctcgaatgggagacagattgcaaaaagaatgtgaatatgattcatttggaaatgaggtgaagaagaagaacggtcaacttcaaacttggttactctataatgataagatttattgttctgctaatgatttgtttgccttgcgtactgatacaagtaaagagaaaacattattgtttgacagagtatttggagacaatgaagaggcacctttgttggtattatatgggaatccagtcgaagaactgacaaaggagtttttcaaagtgttatacccagacgcaatggcggggaaaatcaggtttgtttggagatatattccaacattccgtaaaagacaagatactcttccaggatacggcgtatctttgaatatgaagaattatgattatggaaatggagagaaaacatcaaattttgatttaaacaaagatttacacaagataaatgattcaggtatccttataccagttccagagaaaaatcgtgatgaattgggtataaagtttacttcatttatattatcaaatagatacaagattcacaagtatgagttattgtctacattgttgaatgatttcccaaagtttataccatacattgcaaaattgtccaaactgtttaattacgagaaagtcaagacaaaagttacagcgaatcaagacataggaatgtctgatgaatcttatggtatttacatcaatggttcaccaatccatggacttgagttggatatctacaaattgggtaacaaaattcgggaagaattggaaactattcagaatttagtaaagcttgggtttgatagtatccaagctaaattattgctcacaaaatttgccttactttcagcagttaagcaaacccaatttcgtaatggaaacacattaatgggaaataacgaaaatagatttaaagtttaccagagtgaatttgaaaagggcaatcctggtaaaggaggtgttttattttttaacaatatcgaggttgatgttactttcagtgaatacactactaatcgtgaggaggcttatttgggagttagttcttataaattgaaaccaaaccagatcccaccattgaaagaaaatatccatgatttgatctttgctttgaatcttgccaataagagtcaacttcgtgtgttttttacaattgcaaaggtcattttggattctggtattccacaacaaattggattgatccctgttattggtgatgatccattggataaagaaattgccagaaagttttattacattgctgaaaattcaaacaccccagaagctctagcattgttgtacaaatattttgattctgcaaattcagatgaagctgctgctatattaaatcaagttaaagtaagtaaaaattttgacgtggattataactatgttttagataagttttcaattacagaagcatcggttatattcaatggtgttatttatgacttgagatccccaaattggcaaattgcaatgagtaaacagatttctcaagatgtttcactcattaaatcatttttaagacaaggacctgtggaagggaaattgaaagataagctttattcaaatgccaaagaaaaacgtaacttgagggtaattcctctagagcctagtgaaatcatctacaaatcagtcgatactgagttgttaaatgaatctattgctttcaagaaaattgataaggaagatggagtttcaggaacattctggttagtttctgatttcacaaaagtcgaaatgttcaatcaattgattgatttattgagcttccttaagaagaaaccgattcaagtacgggtagttaatactggagacagtaaagtttttaaaagtttacataaaaattacaagctaaccactttgacaaactcccaaattgaagagatcattgaagttttagaggatgctgaactttcaaagtatgataatcctgaagttaaacgattgctcgagaggaaacacttgccgctgcatcattcatttatgctattcaattctaggtacttcagattagatatccctctagaacccactgaattagaagaacttttggaatatgaattcacccaaagattaaatttatttaacgatattttgtatgcatatcctgatgaatttgagtctaaaaaattgaatgaatttaatctgttagtttctggattagatagtatggactggtttgatttagtcagttccatagttacaaagtcatttcatgttgatgaaaagatgtttatttctgatgtgaatagatttgatttcagttccttagatttatcaaactccatagatgttagtgttaacaaagaggaaaatccgattgatatattggtcattatgaatccaatggaagaatattcccaaaaattgttgagtatagttaacagtatcaagacattcccgtttgtgaatatcagaatattgcttcaaccaaaagtggtgtccaacgaagaaattagagttcacagattttaccgtggtgtgtacccttcttcagatattcaattcgatgaaaacactgggatcgtggttgaaaataatattgctgagttccacaatcttccagttgatacacgattgtcaacagaattagatgtgcctactaaatggatcgtcgtaagtaaactgagttcgacagatttagataatgttgctttcaataaagtagtcaaatcggtcaatggaaaattcttgttgaaacatattttgatcgaaggatttgcaagagatatacatacaggtagaactcctgatggtttatcattcaaattggtgcataataatattactacagatactcaagttatgagttcgttggattattttcaactcaaagccattcctggtattagtttattgtcaagcaatccagagtataatttgttatcagcctctgaaaataagtacgatttcaaccatgattcgttagacgaagttgaggtaccagtattttctttagatggggtgactttgtatcctagaattagcaaaggagatggtataacgaagtattctaatagacatgctgatataaacatttttacgattgctggtggtagtttatatgaaaaattagctagtattatgattgcatctgtacgcaaaaacaatccggaactgataattaaattttggatacttgaaaattacatcactcctgagtttagacaattaatgcaattgatttcgaaaaagtatactgtgcaatatgaatttatcaattataaatggccaaaattcttgagaaatcagaaatccaaggaaagaaccatttgggggtataagattttgttcttggatgttcttttcccacaagatcttgataatgtcattttcattgacgctgatcaaacgtgtcgatctgatttaactgaattggttaatatggatttgcaaggagcgccatatggattcacgccaatgtgtgattcgcgtaaggaaatggaaggtttcagattctggaaacagggatactggtcagatgtattgaaagatgatttacaatatcatatcagcgcattatatgtggttgatttaaagcagttcagatcaattaaagcgggtgatagattaagggcacattatcagaaattatccagtgatcctaattcattaagcaatttagaccaagatttaccaaacaatatgcagagacaaattaagatattcagcttaccacaaaattggttatggtgtgagacatggtgttcagatgaaagttttagagatgccaaaatgattgatctttgcaacaatccgttatccaaggaaaataaacttgatatggccaagagattattaccagaatgggttgaatatgagaaagaaatagacgaattggtaagcaatttgaaagaaatactgctgagtgtggaagatgatgaaaatgaagaaatggaagacgatagtattctctttgaagacactggttttgatgaagaagaagaagaagaagaggaagattatcacgatgagttatag

SEQ ID NO: 27 - protein, 1477 aa, Claviceps purpurea
MFLILEQWPLLLWLALVARVVAVPAVRVGMTAAFNAGPYLLELIETAAGENTSSYFPILDRVASGYFSEASSDSDLYDQFLGVLRNDGHIKDPDALSTFNLALSLRSAAPRIEAHYQYYRTAIEPFVEHRNCEVWVLFDRKQYCTPDLDIVVRDELFSAIVKTLPFDRTIGIGREAILFADPTSSKFAQYHQKLSKAARALALNYRIRYRRDNAGLDRPLQIGGYGVQLALKNTDYIVIDDRRTVQDVDQKPLGPSTVLEDEDQDSMNLKTLSKTELRSVGMRAASYVQQSETPFDELVKLSQDFPKHVRYMSSQNISSAFAGEYERIKARMVRNGVNFLWMNGAQLTDRQIDPFTLVDVLRRERSLVNGIRELGVNGADAIALLSHQAVSSAQGEQESSRYDWTDRSENGQVILWFNNLERDDTYDSYPKTLSSLLQRTYPGQIPPVRLNVFNMVFAADLSNTEDLHFMSQVIGLVNRGIPIRFGFVPLQTTSDATSQAKAAYALVKNYGIETLISYIEQLSSKGGVFDESLLLSVTNGRPVFSDSLSMSADGETRGMEVDEQLELSSKWVARLQADTLVRPLFVNGVLVPRDQNWMRSISIIIGDDLQTVQQGIYLGTLDDDSPINGLFLSEARPRRNTYIFQGENKSLRMLNVGKIYADNKEFFETLPVLNANEYATKEDWAAMTVLANMSSTAGLDLTLSALTFKRSNPAVRIDIINTHGDLSVSSQVISALKSKENGLLNLRSIEDLQSIVLEASNFDASGVYAQGLTNVLGDAKLMPGSQGIFLNGRVIGPIAPEFSFSSEDFQDLLAFERTQRILPVFAAAEDLGLTDVISGPIAAAKLSSIVALSTISAVPEGIFDSAPSTRSTLYDVWNTTHTAIQAGDSKAASIHIIGCLDPASEIAQRWAPILRAVSKLHGVYIKIILNPQEKLEELPVKRFYRYVIDSQPTFEKDGSLKLNQATFAGLPSDVLMTAGLDVPPAWLVAPKSSIHDLDNIKLDMAESDVDATYQLQHILIEGHSREGTGSPPRGAQLVLATEAQPDITDTIIMANLGFFQFKANPGLYHIQLKDGRSRDLYSIESIGAHGWEPALGDEGTELVLMDFQGITVYPRLKRHLGMEEHDVLENPEQDVDTSLLTKGLKLAERFLGKGKQDLSEPKHADINIFSVASGHLYERMLSIMILSVMRNTKHTVKFWFIEQFLSPSFKQFIPHLAEAYRFTYEMVTYKWPHWLRQQKEKQREIWGYKILFLDVLFPLSLDKVIFVDADQIVRTDMMNLVNLDLHGAPYGFTPMCDSRVEMEGFRFWKQGYWANYLRGKPYHISALYVVDLRRFRELAAGDRLRQQYHALSADPGSLSNLDQDLPNHMQFQIPIHSLPQEWLWCETWCSDDSLKKAHTIDLCNNPLTKEPKLDRARRQVPEWTTYDDEIAVLEAEKGLGRARETRSNFDHEVSQVAEPAKKPAEKPNQGVHQMDEL

SEQ ID NO: 28 - DNA, 4434 bp, Claviceps purpurea
atgttcctgatacttgagcaatggccattgctcctttggctggcgctcgttgcacgagtagtagctgtgcccgctgtaagagttggtatgactgctgcattcaatgccgggccgtacttgttggagctcattgagacagccgcaggagaaaatacgtcatcttattttccgatcttagaccgtgtcgcgagtggctatttcagtgaagcctcgtcagattctgatctgtatgaccagtttctcggagtccttcgtaatgatgggcacattaaagatcctgacgctctctccacgttcaatcttgcactctctctgcgctcagcagcacctagaatcgaagcacactatcaatattacagaactgcgatagagccgtttgtggagcaccgcaattgtgaggtctgggttctgtttgaccggaagcaatactgcacaccagatctcgatatcgtcgtcagagatgagctgttctcagccatcgtaaagacactaccatttgaccgaacgattggtataggcagagaagccattctttttgcagatccgacatcatccaaatttgcacaatatcaccagaaattatcgaaagccgcgcgtgccttggctctgaactacagaattcgctaccgacgtgataatgcaggactcgatcgaccattgcagatcggtggctacggcgttcaacttgctctaaaaaacactgactatattgtcattgatgatcgtcgcacggttcaagacgtcgaccagaagccactgggacctagcacagtattggaagatgaagatcaagattcaatgaacttaaagactctttctaagacggagcttcgttcggtgggtatgagagcggcctcatacgtacagcaaagtgaaacccctttcgatgagctcgttaagctctcacaggacttccctaagcatgtccggtacatgtcctcacaaaacatttcaagcgctttcgctggagaatatgagcgaatcaaggcacggatggtgcgtaacggtgtgaattttctctggatgaatggtgctcagctcactgaccggcaaattgacccattcacccttgtcgatgttctgagacgagagcgcagcctagtcaacggaattcgcgaacttggggtaaatggggctgatgcaatcgctttactcagccatcaagccgtgtcgtccgcgcagggtgagcaggaatcgtcgaggtacgattggacggatcgatcagaaaatggacaagtgatattgtggttcaataacctggagcgggacgatacctacgattcataccctaagactctatcctcactacttcaaagaacctatcccggccaaatcccacctgtcaggctgaacgtcttcaatatggtttttgccgctgacctgtcaaataccgaagacctccatttcatgagtcaagttattggcctagtgaatcgaggcatccctatcagatttggatttgtgccattgcaaaccacgagtgacgcgacaagtcaggcaaaggcagcgtatgctctcgtgaaaaactatggcatcgaaactctgatctcatacatcgagcaattgagttcgaaaggcggagttttcgatgaatcacttctcctatctgtcactaatggccggccggtgttttccgatagcttatccatgtcagctgatggggaaacgagaggcatggaagttgacgagcaacttgaactaagcagcaagtgggttgcaagactccaggctgacactcttgtccgcccactttttgtcaacggcgttctcgttcctcgcgatcaaaactggatgcgaagcataagcatcatcataggagacgatcttcagacggtacaacaaggaatatatcttggcactcttgacgacgatagcccaataaacggattatttctcagcgaagcaagaccgcgacggaacacgtacatctttcagggtgaaaataaatctctgcggatgctgaatgttggaaagatttatgcggataataaggaattctttgagacacttccagttctcaacgccaatgaatatgcaacgaaagaggactgggcggcgatgaccgtgcttgcgaacatgtcttcaaccgctggtctggacctcacattatcagcgctgaccttcaagagaagtaatccggcagtccgtattgatattatcaacacacacggcgacttatcagtatcttctcaagtaatatcagccctgaagagcaaggaaaacggattactaaacttgcgctctatcgaggatttgcagtcaatcgtcctggaggcctcaaacttcgatgcatctggggtttacgctcaaggcttgacgaatgtcctcggcgatgcaaagctcatgccgggctcgcaagggatctttttgaatggaagagtgatcggccccatagcgcccgagttctctttctcatccgaggactttcaggacctgttagcttttgaacgtacacaacgcatccttcctgtcttcgccgcagcggaagacctgggcctgactgatgtaatttctggtcccatcgcagcggctaagctcagctctattgttgctttgtcgactatctccgctgtaccggagggaatattcgattccgccccatcgactcgatctacgctttatgacgtctggaatacaacccatacagccatacaggcgggagattcgaaggcagcgagcatacatattataggatgtttggatccagctagcgagatcgcgcaaagatgggccccgattctacgagcagtatccaaattgcacggtgtttacatcaaaatcattttgaacccccaagaaaagcttgaagaacttcccgtcaaacgtttctaccgatacgttatagattcgcagcccacgtttgagaaagatggaagcctcaaacttaatcaagcaactttcgcaggactaccgtctgacgtgctcatgacagcaggcctcgacgtcccaccagcctggctggtagcacccaagtcatcgattcacgaccttgacaatatcaaattagatatggcggaatcagatgttgatgcaacataccaacttcagcacatactgatcgaaggccattcccgagagggcacgggctctcctccacgtggcgcacaacttgttcttgcgacagaggcacagcccgatatcactgacactatcatcatggcgaacttgggattctttcaattcaaagccaatcctggtctttaccacatccagttgaaagacggaaggagccgtgacttatacagcattgagagcattggcgctcatgggtgggagccagcgctgggtgacgaaggtacggaactggttctgatggattttcaaggcataaccgtctatccccggctcaagcgtcatttgggcatggaagagcatgatgttttggagaatcctgaacaggatgtcgacacgagtttgctcacgaaaggacttaagctggctgaaaggtttcttgggaaaggcaagcaggatctgtcagagccaaagcatgccgacatcaacattttctccgtggccagtggacacttatatgagcgcatgttgagcatcatgatcttatccgtcatgcgcaacacaaagcatactgtgaagttctggttcatagagcaattcctctcgccgtctttcaagcaatttatcccgcacttggcggaggcatatcgattcacttacgagatggtaacgtataagtggccccattggctgcgacaacagaaggagaagcagcgggaaatatggggctacaagatcctctttctggatgttttgtttcctctttcgctcgacaaagtcatctttgtcgatgctgaccagatcgtccgtactgatatgatgaacttggtcaatctggatcttcatggcgctccgtatggattcactcccatgtgtgattctcgagttgagatggagggcttccgattctggaagcaagggtactgggccaactacttacgcggaaagccataccacatatccgccctctacgtcgtggacttgcgacgttttcgggaactggccgccggcgatcgtctccgacaacagtatcatgccctttctgccgacccgggcagtctgtccaatcttgaccaagatttgccgaaccatatgcagttccaaattcctattcacagtctgccccaagaatggctctggtgcgagacatggtgcagcgacgacagtctgaaaaaggcgcatactattgacctgtgcaataacccgctgaccaaggaaccaaaactcgacagggccagacggcaagtgcccgagtggacgacctatgatgatgaaattgccgttctcgaagcagaaaaaggactcggtcgggcgagagagacgcgaagcaacttcgatcatgaggtaagtcaagtcgcagagccagcgaagaagccagcagagaagccaaatcagggggtgcaccaaatggatgaattatag

SEQ ID NO: 29 - protein, 1472 aa, Cordyceps militaris
MSRHLSSRLIVAVLAASQVAASPSVNVRMQAAFTSGPYLLELLETATAENSSAYFPLLDRIASGRFAKLSTEAELYEEFTSVVRADGHITSPEAQSTFNLDLSLRSSIPRVEANYQYYDTVVALSDIDTSCEAWVLLGGNQYCTPELDTAAKIGVFDSKLSALPFDRSIGVGKGAVLYADPTSPNFGKFHELLQRAAKAGELNYRVRYRRPLNVRNKPLLVSGFGVELALKRTDYIVIDDRASQHEGGAQKPLNTEAIFEEQESTDIRPLSTSELETLGMKSSSFIQSSKSPFETLVKLMQDFPKFSASISAHNVSTSFSEEYQRGYLQRVPRGVNALWMNGLQLIERQIEPFSLVEMLRRERKLLDIVRNLGLDGVDAISLLGHEKVAASKSDTGEAIRYEWTDKLEDGRAIVWLNDLEKDTRYAQYPDELSSLLQRTFPGQIPAIARNVFNVVSALDLSDADDLTVLSQLAVLITRGIPIHFGVVPLTSNTEALKQAKVIRHLIDRYGFNGLQTYIDGLGEDPDPQLTESSFSQVVDSQIAAADTQAHEYAKVLETEEFDTHFKMAREWITRLKAADKTAPVFFVNGALMPRTANWLQSMSMQISEDLQTVQKGVYHGVIGDDAWVPGIFLERALKRRNEYLSIDDAHPLRILDVSKLYEDHQYLFSTIPVQKCDPQAAKEEWAAVTVITDATSLRGVELILSALEFKQSNPGVQIDFIHNPVSTEGASDVNEALKVATSSSSFGTSGEIEKLVREAKTGSSNGDYAISLKRFLSYAELQPGSSSVLLNGRLIGPIAPEDSFLEDDFTQLLGLERKSRILPVLEALDDLGLGDKVYDPISAAKLTSITALSTIPNLPEGIFESSSSIRSTVYEKWDANHTTIEVGDAESASIHLVALLNPLSEQAQRWVPLLRVLSELDGVYLKLFLNPKEKLEELPIKRFFRYVLESKPSFDESGAIRGGQATFNGLPSEALLTLAMDVPPAWLVAAKDSIHDLDNIKLSSTNSDVDATYELEHILIQGHSREGKSSPPRGAQLVLGTAKEPHLTDTIVMANLGFFQFKANPGIYSIHLKEGRSADIFKIESVGAQGWTAVPGDEGTSLALLDFQGTTLYPRLSRKPGMEEIDVLEEGDGRAEGIVSKGFKLAEGLLGNALGRKSSSDLEHAEINIFSVASGHLYERMLNIMMVSVMRHTKHTVKFWFIEQFLSPSFKEFIPHLAEEYGFKYEMVTYKWPHWLRKQKEKQREIWGYKILFLDVLFPLSVDKVIFVDADQIVRTDMMDLVKLDLEGAPYGFTPMCDSRTEMEGFRFWKQGYWANYLRGRPYHISALYVVDLRRFREIAAGDRLRQQYQALSADPNSLANLDQDLPNHMQFQLPIHSLPQEWLWCETWCSDESQSEARTIDLCNNPETKEPKLDRARRQVPEWTEYDDEIAALAKRVKTTDSRDGNGKKANPERNSKSRNFEEPVHTKDEL

SEQ ID NO: 30 - DNA, 4419 bp, Cordyceps militaris
atgtcccgccacctcagcagccggctgatcgtggcagtattggctgcttcacaagtggctgcgtcaccgtctgtcaacgttcgaatgcaggcggcatttactagcggcccctacttacttgaactacttgaaactgcgacggccgagaactcttcagcttactttcctctactcgatcgaattgccagcgggcgattcgccaaattgtcaactgaggctgagctctatgaagaattcaccagcgtcgtacgagctgatggtcatattaccagcccagaggcccagtctacttttaacctagacctctctttgcggtcctccattccaagagttgaagcaaactaccaatactatgataccgttgtcgcgttatctgatatagatacatcgtgtgaagcatgggttctcttgggcggaaatcaatattgtaccccggaattggatactgctgcgaaaattggggtgttcgactcgaaactatcagctctgccatttgaccgctctataggtgttggcaaaggtgcagtgctctatgcggatccgacatcccccaactttggaaaatttcacgagctgcttcagagagctgccaaagctggcgaactcaattatcgggtgcgataccgtcgccctctaaatgtcaggaacaagccgctgctggtcagcggctttggagtcgaactggctcttaaacgaaccgattatatcgtcattgatgatagagcgtcgcaacatgaagggggagcgcaaaagcccttaaatactgaagccatatttgaggagcaagagtcgaccgacattcgcccgctttcgacttcagagctagagactcttggcatgaagtcttcgtcattcattcagagcagcaagtctcctttcgagactcttgtcaaactcatgcaagactttccaaaattttccgcatcgatctctgcgcacaatgtgtcgacgagcttttctgaagaatatcaacgaggatacctacagcgcgtgccgagaggggttaacgcattgtggatgaatggtttgcaattgatagagcgtcaaattgaaccgttctccctggttgaaatgcttcggcgtgagcgaaagctccttgatatcgtccgcaatctggggttagatggagttgatgccatatcactgcttggacacgaaaaggtcgcggcatccaagtcggatacaggtgaagcgatacgatatgaatggactgacaaattagaggacggtcgtgctatcgtctggctgaatgatctagaaaaggatacccgatatgcccagtatccggacgaactgagttctctgctccaacgcacgtttccaggacaaataccagcaattgccaggaatgtttttaatgtcgtttctgcccttgacttgtcagatgccgatgatttgactgtgttgagccagctggcggtgctcattactcgcggaatcccgatccactttggtgtcgtgccccttacgtccaatacagaagcattgaagcaggcgaaggttattcgtcatttgatcgatagatatggcttcaacggacttcaaacatacattgacggtcttggcgaggatcccgatcctcaattgactgaatcaagcttctctcaagttgttgatagtcaaatagcggccgcggatacccaggctcatgaatacgcgaaagtcctggaaaccgaggagttcgatacacatttcaaaatggctagggaatggattactagactcaaggcagcagacaaaactgcgcctgttttcttcgtcaacggagctttgatgcctcgtactgcgaactggctacaaagcatgagcatgcagatttcggaagatctccaaacggtccagaaaggtgtctaccatggcgtcattggcgacgatgcgtgggttcctggaatcttcctggaaagggccttgaaacgccgcaatgaatatctatctatcgacgatgctcatcctcttcgaattctagacgtcagcaagctatacgaagatcaccaatacctattcagcactattccggtgcagaaatgtgacccgcaagcagcaaaggaggagtgggccgctgtaacagtcatcactgatgcgacttccttgcgcggcgtggagcttatactgtctgccctggagttcaagcaaagcaacccgggcgtccaaatcgatttcatccacaatcctgtgtctacagaaggggcttctgatgtcaacgaagccttgaaggttgccacaagcagttctagctttggcacgagtggcgagattgagaaactcgtacgcgaggcgaagacgggctcctcaaacggtgactatgctatttcgctgaagcggttcctctcgtatgcagagcttcagccaggcagcagcagtgtgcttctgaatggacgtctgatcggtccaatcgcaccagaagatagctttttggaggatgacttcacacaacttctgggacttgagcgaaaatcccgaatcctccctgtcctcgaagctctcgacgatctcggcttgggcgacaaagtttatgatcccatttccgccgccaaattgacgtccatcaccgccttatcgaccatacccaacctaccagaaggcattttcgaatcctcgtcgtcaattcgatcaacagtctatgaaaaatgggatgcaaaccacaccacaattgaagtcggcgatgcagaaagtgccagtattcatctcgttgccttgctcaatccattgagtgagcaagctcagcgatgggtaccgcttctgagagtcttgtcggaacttgacggtgtgtatctgaagttgtttctaaaccctaaggagaaactcgaagagcttcctatcaagcggttcttccgttacgtcctcgaatcgaagccctcttttgacgaatctggcgccatcagaggcggccaggctaccttcaatggactaccctcagaagcccttctcacactcgcgatggatgtaccacctgcttggctagtagcagctaaagattccattcatgacttggacaatatcaagctctcttcgacaaattccgacgtcgacgcaacgtatgaactagaacatatcctcatacagggtcactccagggaaggaaagtccagcccccctcgcggcgcccagcttgtcttgggaactgcgaaggagccgcacttgactgatacaattgtcatggccaacctgggattttttcaattcaaagccaaccccggcatctattctattcatctgaaagaaggacgaagtgcagacatcttcaagattgagagcgtaggcgcacagggctggacggcggtaccgggcgatgagggtacatctttagctttacttgacttccaagggacgacactctatcctcgactctcccgcaagccaggcatggaagagatcgacgtcctggaggaaggcgatggaagagcggagggcattgtctccaaaggctttaagctggcagagggcttattgggcaacgctttgggcagaaagtcatcctctgatttggaacacgctgaaatcaacatcttttccgttgccagtggacacttgtatgagcgaatgctcaacatcatgatggtctcagttatgcggcacacaaaacacacagtcaaattctggttcattgaacagtttttgtccccatcgtttaaggaatttattcctcatctcgctgaggagtatggcttcaagtatgaaatggtgacgtacaaatggccgcattggcttcgaaagcaaaaagagaaacagagggaaatttggggctacaagatactgtttttggatgttcttttccccctctctgttgacaaagttatctttgtggacgcggatcaaattgtgcggacagatatgatggacttggtcaaactcgatctcgaaggggctccgtatggatttactcccatgtgcgactctcgtactgaaatggaaggattccgcttctggaaacagggatactgggcaaactaccttcgtggacgtccctaccacatttccgccctctacgtggttgacctgcgccgcttccgcgagattgccgctggtgatcgccttcgacagcagtaccaagctctttccgccgaccccaacagcctagcgaacctagatcaagatttgcccaaccacatgcaattccagctccccatccatagcttgccccaggaatggttgtggtgtgagacgtggtgtagtgacgagagccagagcgaagcgcgaaccattgacctctgcaataatcccgagaccaaggagcccaagctcgatcgtgctcgccgtcaagttcccgaatggaccgagtacgatgacgagattgcagcattggcgaagcgcgtcaagaccacggacagccgcgatggaaacgggaagaaagcaaacccggaaagaaacagcaagagccggaactttgaggaacccgtccacaccaaggatgagctgtga

SEQ ID NO: 31 - protein, 1543 aa, Cryptococcus neoformans
MRANTVALALAASALAASASPPVRVSLETSWAAPPLVLEILETVYDEYPSSYFPLLHLLSSLPADSTDESILSSTLDLIQAYSLLPSPSSLSTFHLALSLHSTAPRIEAEYNWYNSAANRNQKPLSLPFDHTSPSVSSTSSSPRAIFYYAPFASTSNELLGYLDHHASQYPEFTYTVRYQPPLSDEAKKPLSLSGWGAEMALKKMDYLVVDDRATGETTFRDESDEVARNESNIFAHVFGDDPWGDQATHLTAAEIRDIGLKAATLIMSSDDPISALIHLSQDFPKYSAALARQVEVPEDIQSKGRTIAVRGNAKEAIYINGKPFDRDLNPYTLLKALRDERQLTVSLTSLGLTPKQSIDILGDPVVGQGQIEDDMGEGLVDASDRIEGGDVIVYWNDIEKDKRYQNWPIHPQGYMRPLYHGQFHTVRRNTFNLIFALDLSRISSLELIVHSISAMIQRGLPIRFGIVPVFEPEQQDDISFQMAKVFWYSVKTFGRSSTRDFLAAIIDATPRQLNNPAPQVNDDVLRKGYEALSATSKKASLAFDDVLTSEDWDRHVEKTGNYLKRLLITKKDAENGGMFMNGRFTPNAPAWPNIVTQEMQSQLAFIQGQASKVMLDAIPEDISTMFYDLPSTSKRRSSLVIPVGDNKLKVFNLVDLFKNEGIEGKLSGEFVYPDGERGTPISMWIIGDLDSPEGLETVKNGLQHLQTSQCASRLGFIHVPPARSHSSCPAGQYCFSTVLYQILSQNALSLTKPSDLLELISDVQHSIKTNLEKAGEIEVGNQGVDDCGTTFTLSPEDQQKYFEAKPLHGMTFGGWAAGDIAAASEFWKAGTQISGKLGITDGVHLLANGRLVGPITPVTFPLDDFEALEVYEHRKRVKPIIDILKTMYDDIAAFDRPTLANLISKVSSVVTSAYKPLDGEGIFAPTQLTRTRYYERLDDGSMSFKLGDEDMSLLKVAIVVNPLSEQAQKWSPLIQTLSEMEHVFVSVYLEPEALMEEVKLKRFYRTSVPSRLTFDVDGAAIAPGLTFNSLPSNPIYTLGLDTPPSWIVSPRTSPYDLDNLLLSSISSPVSVTFQLKQLLIEGHAREAGNIPPRGLQLQLKTLGGDIAADTQVMANLGYLQFRATPGYYTLSIRPGRGEEVFNLESIGAEGWDSPSVEEVGEGVDLGSFDGQTIYPRFARKEGMEKADVLQESVAAPEGLAKQVYSKMKSIVGLSTKATPAKTEHADINIFTVASGLLYERFASIMILSVMKHTNSSVKFWFIENFLSPTFIAFIPKLAEEYGFQYEFVTYKWPHWLRAQTEKQRIIWAYKILFLDVLFPMSLDKVIFVDADQIVRTDMKELMDVDLHGRVYGYAPMGNSRKEMEGFRFWKSGYWKEALRGRPYHISALYVVDLKKFRQLATGDRLRGQYHALSADPNSLANLDQDLPNSMQDQIPIWTLDQDWLWCQTWCSDESLATAKTIDLCQNPLTKEPKLVRARQIPEWDVYDQEIAAFGARVSEEGEESGALAISVDDLASEGYVSGVEGKEEETEREAEGRIGDEL

SEQ ID NO: 32 - DNA, 4632 bp, Cryptococcus neoformans
atgagagcaaacacagtggctctggccctcgcagcttcagcgctcgcggcgtccgcgtctccaccagtacgcgtaagtctcgagacaagctgggcagctccccctttggtcctcgagatcctcgaaactgtgtatgacgaatacccctcatcctacttcccgctccttcatcttttatcctctcttcctgcagactctacagatgagtccatattatcctcgacgctggacctcattcaagcctattcgcttcttccttcgccatcatcactatctactttccaccttgccttgtccctgcactccacagcacctagaatagaagccgaatacaactggtacaacagcgccgccaatagaaaccagaaacctctttcacttcctttcgatcacacttctccgtcggtctcttccacctcatcatctcctcgggccatattctactacgccccattcgcttctacttccaatgaactccttggatacctggatcaccatgcgtctcaatatccagagttcacttataccgtccgttaccagccccctttgtcggatgaggccaaaaaacctttgtctctctcaggatggggcgcggagatggcccttaagaagatggattatctcgttgtcgatgaccgtgctactggggagaccactttccgagatgaaagcgatgaggtggctcggaatgaaagtaacatatttgctcacgtatttggggatgacccgtggggtgatcaagcaacgcatttgacagcagcagagatcagagacattggtctcaaggctgctactcttattatgtcttcagatgaccctatttctgccctgattcatctctcgcaagattttcccaagtattcggctgccctcgctcgtcaagttgaggtaccagaggatatccaatcaaagggcaggacaattgctgtcagaggaaacgcgaaagaagctatatatattaatggtaagccatttgacagggatttgaatccgtatactcttctgaaagcccttcgtgatgagcgccagctcacggtttccctcacttccttgggtcttacccctaagcaatccattgacatactgggggatcccgtcgttggccaaggccagattgaagatgacatgggagaaggtttggtagacgcaagtgatagaatcgagggtggcgacgtcattgtttactggaatgacattgagaaagacaaaagatatcaaaattggcctattcatcctcaggggtacatgcgccctttgtatcatggtcagttccataccgtcaggcggaatacattcaatctcattttcgccctggacctctcgcgaatctcgtcccttgagctcattgtccactccatctctgccatgattcagagaggtttgcctatccgatttggtatagtacctgtttttgagcctgaacagcaagatgacatctcttttcagatggccaaagtcttctggtactctgtcaagacctttggaagaagctcaacccgggacttcctcgctgcgatcatcgacgcaactccgcgccagctcaacaatcctgctcctcaagtaaatgatgatgttctccgtaaagggtatgaagccctttccgcgacttctaaaaaggcatctctagcctttgatgatgttttgacctctgaagattgggatcgccatgtcgagaagactgggaattatttgaagaggttgttaattacgaaaaaagacgcagagaatggcggtatgttcatgaacgggaggtttacgcctaatgcgcctgcctggcccaacattgttacgcaagagatgcaatcgcagctcgcattcatccaaggacaggcaagtaaggtcatgttggatgcaatccccgaagacatctcaaccatgttctatgatttgccatccacctctaagaggaggagcagcctcgttattccagttggcgacaacaagctcaaagtcttcaatttggtcgatctctttaaaaatgaggggattgaaggcaaattgagcggagagtttgtctatcccgatggagaaagaggaacgccgatcagtatgtggattataggagatcttgattcccctgaaggtttggagactgtcaagaacggcctacagcacctccaaacttcgcaatgtgcttccaggctcggcttcattcatgtacccccggcacgtagccattcttcttgccccgcgggccaatattgcttctcaactgtgctttaccagatcctttcccaaaacgcactctctttgaccaaaccttctgatctcctggagctcatatcagatgtccagcactctattaagacaaatttggaaaaagctggcgaaattgaggttggtaaccaaggggtggatgactgtggaacgacattcacattgtctcccgaggatcaacagaagtacttcgaggctaaacctttgcacggtatgacgtttggcggttgggctgctggagatatagctgcagctagcgaattctggaaagctgggacgcaaatctccggaaagcttggcatcacggacggtgtacacctgcttgctaatggtcgacttgtcggtcccatcactccagtgacattcccgcttgatgacttcgaagctttggaggtgtacgaacacaggaaacgtgtcaagcctatcattgatattcttaagacgatgtacgatgatattgctgcctttgacagaccaacattggcaaaccttatctccaaagtctcttctgtagtcacctcggcgtataagcctcttgatggtgagggaatctttgcacctacccaattgactaggacgaggtattatgagagacttgacgatggatccatgtcattcaagctcggggatgaggacatgtccttgttgaaggtggcaattgttgtgaacccattatccgagcaagctcaaaagtggtcacctctcatccagactttgtctgaaatggagcacgtctttgtgtctgtatatctagagcctgaggcgctaatggaggaggtcaagttgaagaggttctatcgtacttctgtaccttccaggttgacctttgatgtcgacggtgctgccatagctcctggtctgacattcaacagccttccttccaaccctatctatactcttggtctcgacactccgccgtcctggatcgtctcacccaggacttcaccatatgatctggacaatcttctcctctcctccatctcgtcacctgtctctgtcaccttccagctcaagcaacttttgattgagggccacgctcgagaggcaggcaatattcctcctcgcggtcttcagctacagctcaaaacccttggtggagatatcgctgccgatacgcaagtgatggctaacctcggttacttacaattccgcgccacgcctggttactatactttgtcgatcagaccgggcagaggtgaagaagtcttcaaccttgagagcattggtgctgagggttgggatagtccgtcggttgaggaagtcggagaaggtgtcgacctgggaagctttgatggacagacgatatacccaaggttcgcaagaaaagagggtatggagaaagccgacgtccttcaagagtcagttgctgctccggaaggattggcgaaacaagtttattcaaagatgaagtctatcgttggattgtcaacaaaggctacgcccgctaagactgagcatgccgatattaacattttcactgttgcgtctggtcttttgtacgagcgttttgcgtcaatcatgattcttagtgtcatgaagcacaccaatagctctgtcaaattttggtttatcgaaaacttcctttccccaactttcattgcgtttatccctaagcttgccgaggaatatggctttcaatacgagttcgtgacttacaagtggccacattggctgcgagctcagacagagaaacaacgtatcatttgggcatacaagatccttttcctcgatgtccttttccccatgtctcttgacaaagtcatctttgtggatgccgaccagattgttcgtactgacatgaaggagctaatggatgtcgatttgcatggaagggtctacggctatgcgcctatgggtaacagccgaaaggagatggaaggtttcagattctggaagagcggatattggaaggaagcgctgagaggaagaccgtaccatatcagtgctttgtatgttgttgatcttaaaaagttcaggcagctcgctacgggagatcgacttcgagggcaataccatgcactttcagccgatcctaattcacttgccaacctggaccaagatcttcccaattcaatgcaggatcaaatccctatatggacattggatcaagactggttgtggtgccaaacttggtgcagcgatgaaagtttggccacggcgaagactatcgacctttgtcaaaaccctcttactaaagaacccaagcttgttcgtgctcgacagattccagaatgggacgtctacgaccaagaaattgccgcgttcggtgctcgggtgtcagaggagggtgaagaaagcggagctttggctatcagcgtggatgatttggcgtcagaaggctatgtttctggggtcgaagggaaagaagaggagacagagcgtgaagctgaaggacgtattggggatgagttgtga

SEQ ID NO: 33 - protein, 1455 aa, Fusarium fujikuroi
MALVAATASLASPSVNVGMNAAFPRAPYLLELLETAAGENSTAYFPLLDKIAGGHFQSANSDAELYDRFLKVLEQDGHVTTPDALSTFKLALSLRAAAPRIEAHYQYYTTAIDSVSKGDTNEDCSTWALIDSKKYCSETLDKAVEGDFSTRQANLLPFDRVLGLGKDAILYADPTSASFGPFHIALSKAAKQGDMSYRLRYRRSAEAPNTPLCVSGYGVKLDLKRTDYIVIDDREASQEGKQKSATADVDLDTNEDVADLKPLSTSELASLGLKTASFILNSENPLDALVKSTQDFPKFSASIATHEVTKEFAAEQEKNVAAGIPSGINFLWMNGVQLIERQIEPFTLIEMIRRERKLIDGVRDLGFNGQQANSLLGHSEVASSKAEDEPSRFDWTDRLEEGKALLWLNDLEKDARYQKLPSDLTALLQRTYPGQLPQVALNLFHIVAPVDFTNIEDGRAFGQLAQFMQRGVTLRFGILPLATTPASAAQAKVVYHLMETYGFESLITYLQESEEGPEGAANKKAFTRAIDGRETLPGATKMTLAEILEADTYKQKVEASKAWASRLNADTAVRPVFVNGLAISREKSWVQIMGQRLTEDQQAIQKAVYFGQIEEGTPVSDLFLRDALSKRNTYIFPDDEKALRVVDVNKLHKDFAGLFSNIAVLPSDSKASKESWAVLTVVADLGAGDGQDLLLAALEFKSKNPGVRLDLVHNPPSSAEAHAINGAFKLNEGKLAEMKSKDDLKAILEASWTAEGDGLGTALADFLSASKILPGTKGLLLNGRVVGPLPSHVSFKEDDLQQLLEFERRNRILPVYAAIKDLGFEDKLLDPIAAAKLTSITALSTISDLPQGIFESAPSIRSSMYNTWNSTHSAIEVGNPETASVHIAGLLNPTSEQGQRWAPILKVLSELDGVYLKLFMNPKEVVGELPITRFFRYVLDSKPSFDQAGHVQNPKATFKGLPSEALLTAGMDVPPAWLVAAKESVQDLDNIKLSSVKADIDVIYELENILIEGHSRDGKRGAPRGAQLTLATEKDPLITDTIVMANLGYFQFKANPGFYNIQLKQGRTSKIFTIESVGAHGYTPVPGDEGTEIALMDFKGTTLYPRLNRKPGMEEVDVLESPDSEASGIVAKGLKFAESLLGGAKSPQEISAEEHAEINIFSVASGHLYERMLNIMMVSVMRNTKHTVKFWFIEQFLSPSFKEFIPHMAAEYGFKYEMVTYKWPHWLRQQKEKQREIWGYKILFLDVLFPLSLDKVIFVDADQIVRTDMIDLVNHDLEGAPYGFTPMCDSRTEMEGFRFWKQGYWANYLRGLPYHISALYVVDLNRFRQLAAGDRLRQQYHALSADPNSLSNLDQDLPNNMQFTIPIHSLPQEWLWCETWCSDESLAQARTIDLCNNPQTKEPKLDRARRQVPEWSVYDEEIAALNRRRKVVGDMSEKNPKSRTMEEEVHTKDEL

SEQ ID NO: 34 - DNA, 4368 bp, Fusarium fujikuroi
atggccctggtggccgctacagcttctttggcttcaccgtcagtcaacgtgggaatgaacgctgcgttccctcgtgctccatatttgcttgaacttctagaaactgccgctggggaaaattcaacagcatacttccctctacttgacaagattgctggtggtcactttcaatcagccaattcagatgcagagctctacgaccgtttcctcaaggtccttgagcaagacgggcacgtcactacaccagacgccctctcaactttcaagcttgctctttcactacgtgctgccgcaccacgaatagaagcacattaccaatactacactacagctatcgattcagtatccaaaggagacaccaacgaggattgctcgacatgggccttgattgatagcaagaaatactgttcagaaactctcgataaagccgtggaaggtgatttctccacaaggcaagccaacttattgccgtttgatcgagtcctagggcttggaaaagatgccattctctacgcggacccaacatctgcctctttcggccctttccacattgcgctctccaaagctgccaagcagggagatatgtcatatagactgcgatatcgccgaagcgcagaggcgcccaatactcctttgtgtgtgagcggttatggtgtcaagctggacctaaagagaactgactacattgttattgatgatcgtgaagccagccaggaaggcaaacagaaatctgccacagccgacgtcgatcttgacacaaatgaagatgttgctgatttgaagcctctctcaacctccgagctagcatctttaggcctaaagactgcttcgttcattctaaatagtgaaaatcctctcgatgctttggtcaaatcgacccaggatttccccaagttctcagcatcgattgccactcatgaagtcacaaaggagtttgctgcagagcaggagaaaaacgtcgctgccggtattcccagtggcatcaactttctctggatgaatggtgtccaacttattgagcgccaaattgagccattcacgctcattgagatgattcgccgtgagcgcaagctgatcgatggggttcgtgatcttggtttcaatggccaacaagctaattcacttcttggacattctgaagttgccagctccaaggctgaggatgaaccgtccaggttcgactggacagatcgattagaggagggcaaagcactcttgtggctgaatgacctcgagaaggacgctcgataccagaagctcccaagcgatttgacagcactccttcagcgtacatatcctggacaacttccgcaggtggctcttaacctcttccacattgtggcaccagttgacttcaccaatattgaggatggacgagcatttggtcaactagcccagttcatgcaacgcggtgtcaccttgaggttcggcatacttcccttggccactacgcctgcttctgctgctcaggccaaggtcgtttatcatttaatggaaacatatggattcgagtccctcattacttatcttcaagagagtgaagaggggccagagggtgcggccaacaagaaggctttcaccagggctattgatggacgagaaacactaccaggagccaccaaaatgacattggccgagattctcgaagccgatacttataagcagaaggtggaggcaagcaaggcttgggctagccgactcaatgctgacactgccgtgcgtcctgtctttgtgaatggtttggctatttcgcgtgagaagtcgtgggttcagatcatgggccagcgattaaccgaggatcaacaggcaatccagaaggctgtgtactttggacaaattgaagaggggacgcctgtttcggatctcttcctccgtgacgctctttccaagcgcaacacgtacatctttcctgacgatgagaaagcccttcgcgttgttgacgtcaacaagcttcataaggactttgcgggactattcagcaacattgccgtccttccctcagactcgaaggcttccaaagaaagctgggctgtgctcacagtcgtcgccgaccttggagccggtgacggacaagaccttcttcttgctgcccttgaattcaaatcaaagaatcctggcgttcggcttgaccttgttcacaacccgccgtcatccgcagaggctcatgccatcaatggtgccttcaagcttaacgaaggcaagcttgctgagatgaagagtaaggatgatctgaaagccattcttgaggcgtcttggacagctgaaggtgatggccttggcactgcgcttgccgacttcctttctgcttcgaaaattctccctggtacaaagggactactcctcaacggccgagtcgtcggtcccctgccgtcccatgtgtctttcaaggaggacgatttgcagcagctattggaatttgagcggcgaaataggatacttcctgtttatgctgcgattaaagaccttggcttcgaagataagcttttggatcccattgcagccgccaagctcacctcgatcacggcactctctactatttctgatctccctcaaggcatctttgagtcggccccgtccattcgaagctccatgtacaacacttggaactctactcatagcgctattgaagtcggcaaccccgaaactgcaagtgttcatatcgctggtctcctgaatcctaccagtgaacaaggtcagagatgggcacccatcctcaaggtcttgtctgagctcgatggagtgtatctgaagctttttatgaacccgaaggaagtagtcggagaactccccatcacgcgattcttccgttacgtacttgactcaaagccttcttttgatcaggctggccatgttcagaaccctaaggcgactttcaaaggccttccctctgaagctctattaacagcaggcatggatgtacctcctgcttggctagtggctgctaaagagtctgtacaggatctggacaacatcaagctgagctctgtcaaagccgacatcgatgtgatttatgagctggagaatattttgattgaaggccactccagagatggcaagcgaggtgcaccaagaggtgcacaattgaccctagccacggaaaaggatccccttatcacagataccatagtcatggccaatctgggctacttccaatttaaggcaaaccctggtttttacaatattcaactcaagcaaggccgaacgtcgaaaatcttcaccatcgagagtgtcggtgctcacggatatactcctgttcccggagacgaaggcacggaaatcgccctcatggacttcaagggtacgaccctgtatcctcgtctcaaccgcaagccaggaatggaagaagtcgatgtactggaatctccagacagcgaagccagcggaattgttgccaagggcctcaagtttgccgaaagtcttctcggaggggccaagtctcctcaagagatttcggccgaagaacatgctgaaattaacatattcagtgttgccagtggtcacttgtacgagcgcatgctcaacatcatgatggtatcggttatgcgtaacaccaagcacaccgtcaagttctggttcattgagcagttcttgtctccctcgttcaaggaattcattcctcatatggctgctgagtatggtttcaagtacgagatggttacttacaagtggcctcattggcttcgccaacaaaaagagaagcagcgtgagatttgggggtacaagatcctgttccttgatgtattgtttccgctttccctggacaaggtaatctttgtcgatgctgatcaaatcgtccgcactgatatgattgaccttgtgaaccatgacctagaaggtgctccgtacggtttcacgcccatgtgcgactcgcgcactgagatggaaggcttcagattctggaaacagggctactgggcgaactatcttcgcgggctgccgtaccatatctcagccctctacgttgttgaccttaaccggttccgccagctggcagcaggagaccgccttcgacagcagtaccacgcactctcggctgaccctaacagcttgtccaacctggaccaggacctgccaaacaacatgcaattcacaattccaatccacagtcttcctcaagagtggctctggtgtgagacgtggtgcagcgacgagagtctggcccaggcgcgtaccattgacttgtgtaacaatccgcagacaaaggagcccaaactcgatcgcgccaggaggcaagtcccagaatggtctgtctacgatgaggagattgcggcgctgaatcgtcgacgcaaggttgttggagatatgagtgagaagaacccgaagagcaggacgatggaggaggaagtgcatacaaaggacgagctttga

SEQ ID NO: 35 - protein, 1463 aa, Fusarium graminearum
MLRLSQYMAMAVLAATAASASPSVNVGMHAAFPHGPYLLELLETAAGENSTAYFPLLDKIASGHFASANSDAELYHQFLQVLQEDRHIIARDALSTFKLSLSLRAAAPRIEAHYQYYSTAVDPESQIDGAGNCQSWALIDNQKYCSPDLDVAVEGKVVSKQAKVLPFDRVLGIGKDAILYADPTHASFGPFHDVLSKAARQGDVSYRLRYRRSPGVSNTPLPVSGYGVKLDLKRTDYIVIDDREATQETQKPHIVADVDLDTDEEVADLKPLSSSELASLGLKTASFILKSDNPMDALLKSTQDFPKFSASIASHEVTPGFAQEQEKNVAAGVPSGINFLWMNGVQLIERQIEPFTLIEMIRRERKLIDGVREIGFNGQQAVSLLGHSEIASSKADDEPPRFDWTDRLEDGKAVMWLNDLETDSRYQKFPSDLTALLQRAYPGQLPQVALNLFHVVAPIDFTDLEDGRAFGQLTQFMQRGITIRFGIVPLATTPASIAQAKVVYHLMETYGFESLITYLQESEEGPEGAANKRSFAKAIDGREPMPAMTKMTLSEVLEAKSYAQKVKAGQAWASRLNAATPVRPILVNGMVIPREKNWVQVMGQRLTEDQQTIQKAVYFGHVNEDTPVSDLFLKTALSKRNAHIFPDDDKTLRILDVNKLYTDHAELFSKIAVLPADVESAKEDWAVLTVIADLNTNDGQDLLLTALKFKRNNQGIRLDLVHNPSLPSNAHAINGAFKLSEVKLVEMRCKDDLKAVLEAPWTAEEDGFGTALANFLLTSNIQPGTKGLLLNGRFVGPLPSSVSFEDDDLKLLLEFEQRSRILPVYAAIKELGFADRLSDPISAAKLTSITALSTISDLPQGIFESAPSIRSTLYNTWNATHSTIEVGNPETASVHIAGLLNPTSEQGQRWAPILKVLSELDGIYLKLFMNPKELTGELPIKRFFRYVLDSTPSFDDSGHVQSPKATFKGLPSEALLTAGMDVPPAWLVAAKDSIQDLDNIKLSSIKSDIDVVYELENILVEGHSRDGKRGAPRGAQLALATEKDPLITDTIVMANLGYFQFKANPGFYSIRLKEGRSSEIFTIESAGAHGYAAVPGDEGTEIALMDFKGTTLYPRLNRKSGMEEADVLESVDSDNDGIVAKGLKFAESLLGGAKSPKEISAQEHAEINIFSVASGHLYERMLNIMMVSVMRNTKHSVKFWFIEQFLSPSFKEFIPHMAAEYGFKYEMVTYKWPHWLRQQKEKQREIWGYKILFLDVLFPLSLDKVIFVDADQIVRTDMIDLVNHDLEGAPYGFTPMCDSRTEMEGFRFWKQGYWANYLRGLPYHISALYVVDLNRFRQLAAGDRLRQQYHTLSADPNSLSNLDQDLPNNMQFAIPIHSLPQEWLWCETWCSDDSLTKARTIDLCNNPQTKEPKLDRARRQVPEWTIYDNEIAALDQRRKGVAGKNENTRSRESEDKAHTKDEL

SEQ ID NO: 36 - DNA, 4392 bp, Fusarium graminearum
atgctgcgtctctcacagtatatggccatggccgtgttggctgccacggctgcgtctgcgtccccgtcagtcaatgtgggaatgcacgccgccttccctcacgggccatatctgcttgagctccttgagacagctgccggggagaactcgactgcgtatttcccacttctcgataaaattgctagtggccattttgcatcggccaattcagacgcagagctctaccatcagttccttcaagtccttcaggaagatcgccatatcatcgcacgcgatgccctttctaccttcaagctatctctctccctacgggctgccgcaccacgtatagaagcgcactaccaatattacagtacagctgtggaccccgaatctcaaatagatggtgctggtaactgccagagttgggctttaattgataaccaaaaatactgctctccagatcttgatgtggctgttgagggcaaagtagtctccaaacaagcaaaggtgctgccattcgatcgagtcttgggaattggaaaggatgctatcctttatgcggatcctacgcacgcctcttttgggcctttccatgatgtcctctcaaaggctgcaaggcagggtgatgtttcttacagactgcggtaccgtcgaagccctggtgtttccaatactcccttgcctgtgagcggctacggtgttaaattggatctgaagcggactgattatatcgtgattgatgatcgtgaagcaactcaggagacccaaaaaccgcatattgtggccgatgttgatcttgacactgacgaggaggttgctgacctgaagcctctttcatcttccgagctagcatctctgggcctcaagactgcgtctttcattctcaagagcgataaccccatggatgctttgctgaaatcaacacaagatttccccaagttctcggcatctattgcttcccacgaagtcacgccggggtttgcccaggagcaagagaaaaacgttgcggctggtgtccctagtggaattaatttcctttggatgaatggcgttcaactcattgagcgccagattgagcctttcacactgatagaaatgattcggcgtgaacgcaagcttattgatggtgtacgcgaaattggctttaatggccaacaggctgtctctcttcttggccattctgagattgccagttctaaagccgatgatgagcctccgaggtttgactggactgatcggctagaggacggaaaggctgttatgtggctcaacgaccttgagacagattcccggtatcaaaagttcccaagtgatctgacggcgctcctccagcgcgcatacccaggtcaacttccacaggtcgccctcaatctctttcatgtcgttgcacctatcgacttcactgaccttgaagacggaagagcttttggtcaattgactcaattcatgcaacgcggaatcactatacgcttcggtatcgttcctttagccaccacccctgcctccatcgctcaagccaaggttgtctaccatttgatggaaacgtatggctttgaatctctcatcacatatctacaagagagcgaagagggccccgagggtgcggctaataagaggtcgttcgcaaaagctatcgatggacgagaaccaatgccagcaatgactaagatgaccttgagcgaagttcttgaggccaagtcttacgcgcagaaagtcaaggcaggccaggcctgggcaagtcgactcaacgctgccacccctgtgcgcccgattctcgtcaatggcatggttatcccacgtgagaagaattgggtgcaggtaatgggtcagcgattaactgaggatcaacagacaatccagaaagctgtgtactttgggcacgttaatgaggacacgcccgtttcagatctctttcttaaaactgccctttcaaagagaaacgcgcatatcttccccgatgatgataagactctccgtatcctagatgtcaacaaactctacacagatcatgcagagctatttagtaaaatagctgttttgcctgctgatgttgagagtgccaaagaagactgggccgtgctcacagtcatcgccgacctcaacactaacgatgggcaagatctcttgcttactgctctcaaattcaagcgcaacaatcagggaatccggcttgatcttgttcataatccctctttaccttcgaatgctcatgcaatcaacggcgcattcaagctcagcgaggttaaacttgtcgagatgaggtgcaaggacgatctgaaggctgtgcttgaagcgccatggacagctgaagaggatgggtttggtactgcgctagccaacttcctattgacttccaacattcaacccggaacaaaaggtctactcctcaatggccgattcgtcggtcccttgccatctagtgtctccttcgaagacgatgacctgaagctacttttggagtttgaacaacgcagtaggatccttcctgtttatgctgcgattaaagagctcggcttcgcagatagactctccgatcccatttcggctgcaaagctcacctctattacggcgctctctaccatatccgaccttcctcagggcatatttgagtccgccccgtcgatacgaagcaccctttacaacacttggaatgcaacacacagcactattgaggtcggcaacccagaaactgcgagcgtccatatcgccggtctcctcaatcccactagtgaacagggacagagatgggctcctatcctcaaggtcttgtcggaacttgatggtatatatctgaagctcttcatgaatcccaaggagttgacaggagaacttcccattaagcgcttcttccgctacgtacttgattccacgccgtcctttgacgattctggtcacgttcaaagccccaaggctactttcaaaggccttccttccgaagcactgttgacggcaggcatggatgtccctcctgcttggttggtggctgccaaagattcgatccaggatttagacaacatcaagcttagctctatcaagtcagatatcgatgtggtttatgaattagagaacattcttgttgaaggccactcgagagacggcaagcggggtgctccaaggggtgcacaactggcattagcaaccgaaaaggatcctctcataacagataccattgttatggctaacctcggatacttccagttcaaagccaatccaggattctatagtatccgactcaaggaaggtcgcagctcggagatcttcactattgagagtgctggcgcccatggctacgctgctgtgcctggagacgaaggcacagaaattgcactcatggacttcaagggaacaacgttatacccacgtctaaatcgcaagtctggaatggaagaggccgatgtcctggaatcagtcgatagtgacaacgacggcattgttgctaagggtctcaagtttgcggaaagtctccttggcggagccaagtcgcccaaggaaatctcggctcaagagcatgctgaaatcaacatcttcagcgttgccagcggtcacttgtatgaacgcatgctcaacatcatgatggtttcagttatgcggaacaccaaacattcagtcaagttctggttcatcgagcagttcctctccccatcgttcaaagaattcatcccgcatatggcagctgagtacgggttcaagtacgagatggtcacctacaaatggcctcactggcttcgtcaacaaaaggaaaagcaacgcgaaatctggggatacaagatactgttcctcgatgtattgtttcctctgtctctcgacaaagtcatctttgttgatgcggatcaaattgttcgaactgatatgatcgaccttgtgaaccatgatcttgagggcgcgccatatggtttcacgcccatgtgcgactcgcgcaccgaaatggaaggcttcaggttctggaagcaaggctactgggcgaattatctccgtggactaccataccacatttcggcgctctacgttgtcgaccttaaccgcttccgccaactagcagcaggagatcgccttcgacaacagtatcacacactttcagctgatcctaacagcttgtctaacctggatcaagatctcccaaataacatgcagttcgctattccaatccatagtcttcctcaggagtggctctggtgcgaaacttggtgcagcgatgacagtttgactaaggcacgcactatcgacctttgcaataatccgcaaacaaaggaacccaaactcgatcgtgcaagacgccaggtgccagagtggaccatctacgacaacgaaattgcggccctcgatcaacggcgcaagggtgttgcgggcaaaaacgagaacactagaagcagagagtcggaagacaaggcacatacaaaggatgagctctag

SEQ ID NO: 37 - protein, 1464 aa, Fusarium oxysporum
MPCLSQCLAMALVAATAALASPSVNVGMNAAFPRAPYLLELLETAAEENSTAYFPLLDRIASGHFQSANSDAEIYDRFLEVLQQDGHITKPEALSTFKLALSLRAAAPRIEAHYQYYTTAVDPVSKGDTNEDCSTWALLDSKKYCSETLDKAVEGDLSARQANLLPFDRVLGLGKDAILYADPTSASFGPFHVALSKAAKQGDMSYRLRYRRSAGAPHTSLSVSGYGVKLDLKRTDYIVIDDREASQESKQKPAAADVDLDTDEEVADLKPLSTSELASLGLKTASFILNSENPLDALVKSTQDFPKFSASIATHEVAKEFAAEQEKNVAAGIPSGINFLWMNGVQLIERQIEPFTLIEMIRRERKLIDGVRDLGFNGQQANSLLGHSEVASSKAEDEPPRFDWTDRLEDGKALLWLNDLEKDARYQKLPSDLTALLQRTYPGQLPQVALNLFHIVAPVDFTNIEDGRAFGQLAQFMQRGVTLRFGILPLATTPASAAQAKVVYHLMETYGFESLITYLQESEEGPEGAANKKAFTRAIDGRETLPGATKMTLAEILEAETYKQKVKASKAWASRLNADTAVRPVFVNGLAIPREKSWVQAMGQRLTEDQQAIQKAVYFGQIEEGTPVSDLFLRNALSKRNTYIFPDDEKALRVVDVNKLHKDFAGLFNNIAVLPSDSKASKESWAVLTVVADLAADDGQDLLLAALEFKRKNPGVRLDLVHNPPSSAEAHAINGAFKLNEGKLAEMKSKDDLKAILEASWTAEDDGLGTALADFLSASNILPGTKGLLLNGRVVGPLPSDVSFKEDDLQQLLEFEQRNRILPVYAAIKDLGFEDKLSDPIAAAKLTSITALSTISDLPQGIFESAPSIRSSMYNTWNSTHSAIEVGNPETASVHIAGLLNPTSEQGQRWAPILKVLSELDGVYLKLFMNPKEVVGELPITRFFRYVLDSKPSFDQAGHVQSPKATFKGLPSEALLTAGMDVPPAWLVAAKESVQDLDNIKLSSVKADIDVVYELENILIEGHSRDGKRGAPRGAQLTLATEKDPLITDTIVMANLGYFQFKANPGFYNIQLKQGRTSKIFTIESVGAHGYAPVPGDEGTEIALMDFKGTTLYPRLNRKPGMEEVDVLESPDSEDSGIVAKGLKFAESLLGGAKSPKEISSEEHAEINIFSVASGHLYERMLNIMIVSVMRNTKHTVKFWFIEQFLSPSFKEFIPHMAAEYGFKYEMVTYKWPHWLRQQKEKQREIWGYKILFLDVLFPLSLDKVIFVDADQIVRTDMIDLVNHDLEGAPYGFTPMCDSRTEMEGFRFWKQGYWANYLRGLPYHISALYVVDLNRFRQLAAGDRLRQQYHALSADPNSLSNLDQDLPNNMQFTIPIHSLPQEWLWCETWCSDESLAQARTIDLCNNPQTKEPKLDRARRQVPEWTVYDEEIAALDRRRKGIEGKDEKNAKSRTMEEEVHTKDEL

SEQ ID NO: 38 - DNA, 4395 bp, Fusarium oxysporum
atgccttgcctttctcaatgtctggctatggccctggtggctgctacagctgctttggcatccccgtcagtcaacgtgggaatgaacgcagcgttccctcgtgctccatatttgcttgaacttctagaaactgccgctgaggaaaactcaacagcatacttccctctgcttgacaggattgctagtggtcactttcaatcagccaactcagatgcagagatctacgaccgtttcctcgaggttcttcagcaagacgggcacataactaaaccagaagccctctcaactttcaagcttgctctttcactacgtgctgccgcaccccgaatagaagcacattaccaatactacactacagctgtcgatccagtatccaaaggagacaccaacgaggattgctcgacatgggcgttgcttgatagcaagaaatactgctcagaaactctcgataaagccgtggaaggtgatctctccgcaaggcaagccaacctgttgccgtttgatcgagtcctggggcttggaaaagatgccattctctatgcggacccaacatctgcctctttcggccccttccacgttgcgctctccaaagctgccaagcagggagatatgtcatatagactgcgatatcgtcgaagcgcaggggctccccatacttctttgtctgtgagcggctatggtgtgaagctggacctgaagagaactgactacatcgttattgatgatcgtgaagccagccaggaaagcaaacagaaacctgccgcagccgacgtcgatcttgacacagatgaagaggttgctgatttgaagcctctctcaacctccgagctagcatctttaggcctgaagactgcttcgttcattctaaatagtgaaaatcctctcgatgctttagtcaaatcgacccaggatttccccaagttctcagcatcgattgccactcatgaagtcgcaaaggagtttgctgcagagcaggagaaaaatgttgctgccggtattcccagtggcatcaactttctctggatgaatggtgtccaacttattgagcgtcaaattgagccatttaccctcattgagatgattcgccgtgagcgcaagctgatcgacggggtccgtgatcttggtttcaatggtcaacaggctaattcacttcttggacattctgaagttgccagttccaaggctgaggatgaaccacccaggttcgactggacagatcgattggaggatggcaaagcgctcttgtggttgaatgacctcgagaaggacgctcgataccagaagctcccaagcgatttgacagcactccttcaacgtacatatcctggacaacttccgcaggtggctcttaacctcttccacattgtggcaccagttgacttcaccaatattgaggatgggcgagcatttggtcaactagcccagttcatgcaacgcggtgtcaccttgaggttcggcatactccccttggccactacgcctgcttctgctgctcaggccaaggttgtttatcatttgatggaaacatatggattcgagtccctcattacttatctccaagagagtgaagaggggccagagggtgcagccaacaagaaggctttcaccagggctattgatggacgagaaacactaccaggagccaccaaaatgacattggctgagattctcgaagccgagacttacaagcagaaggtgaaagcaagcaaggcttgggctagccgactcaatgctgacactgccgtgcgtcctgtctttgtaaatggtttggctattccacgtgagaagtcgtgggttcaggccatgggtcagcgattaaccgaggatcaacaagcaatccaaaaggctgtgtactttggacagattgaagaggggacgcctgtttcagatctcttcctccgtaacgctctttccaagcgcaacacatacatctttcctgatgatgagaaggcccttcgcgttgttgatgtcaacaagcttcataaggactttgcgggactgttcaacaacattgccgtccttccctcagactcgaaggcttccaaagaaagctgggctgtgctcacagtcgtcgccgaccttgcagccgatgacgggcaagatcttcttcttgctgcccttgaattcaagcgaaagaatcctggcgttcggcttgaccttgttcacaacccgccgtcatccgcagaggctcatgccatcaatggcgctttcaagcttaacgaaggcaagcttgctgagatgaagagtaaggatgatctgaaagccattcttgaggcgtcctggacagctgaagatgatggccttggtactgcgcttgccgacttcctctctgcttcaaacattttacctggaacaaagggactactcctcaacggccgagtcgtcggtcccctgccgtccgatgtgtctttcaaggaggacgatttgcagcagctcttggaatttgagcagcgaaacaggatccttcctgtttatgctgcgatcaaggaccttggcttcgaagataagctttcggatcccattgcagccgccaagctcacctcgatcacggcactctctactatttctgatctccctcaaggcatcttcgagtcggccccgtccattcgaagctccatgtacaatacttggaactcaactcatagtgctattgaagtcggcaaccccgaaactgcaagtgttcatatcgctggtctcctgaatcctaccagtgagcaaggtcagagatgggcacccattctcaaggtcttgtctgagctcgatggagtgtatctgaagcttttcatgaacccgaaggaagtagtcggagaactccccatcacgcgattcttccgttacgtacttgactcaaagccttcttttgatcaggctggccatgttcagagccctaaggcgactttcaaaggccttccttctgaggctctgttaacagcaggcatggatgtacctccggcttggctagtggctgctaaagaatctgtacaggacctggacaacatcaagctgagctctgtcaaagccgacatcgatgtggtttacgagctggagaatatcttgattgaaggtcactccagggatggcaagcgaggtgcaccaagaggtgcacaattgaccctggcgacggaaaaggatccccttatcacagataccatagtcatggccaatctgggctacttccagtttaaggcaaaccctggtttctacaatattcaactcaagcaaggccgaacgtcgaaaatcttcaccatcgagagtgtcggtgctcacggatatgctcctgttcccggagacgaaggcacggaaatcgccctcatggacttcaagggtacgaccctatatcctcgtctcaaccgcaagccaggaatggaagaagtcgatgtactggaatctccagatagtgaagacagcggaattgttgctaagggcctcaagtttgccgaaagtctcctcggaggggccaagtcgcccaaggagatttcgtccgaagaacatgctgaaatcaacatcttcagtgttgccagtggtcacttatacgagcgcatgctcaacatcatgatagtatcggttatgcgcaacaccaagcacaccgtcaagttctggttcattgagcagttcttatcgccctcgttcaaggaattcattcctcatatggctgctgagtatggtttcaagtacgagatggttacttacaagtggcctcactggcttcgccaacaaaaagagaagcagcgtgagatctgggggtacaagatcctgttccttgatgtattgtttccgctttccctggacaaggtcatctttgtcgatgctgatcaaatcgttcgcactgatatgattgaccttgtgaaccatgacctagagggtgctccgtacggtttcacacccatgtgcgactcgcgcactgaaatggaaggcttcagattctggaaacagggctactgggcgaactatcttcgtgggctaccgtaccatatctcagccctctacgttgttgaccttaaccggttccgccagctggcagcaggagaccgccttcgacagcagtaccacgcactctcagctgaccctaacagcttgtccaatctggaccaggacctgccaaacaacatgcaattcacaatcccaatccacagtcttcctcaagagtggctctggtgtgagacgtggtgcagcgacgagagtctggcccaggcgcgtaccattgacttgtgtaacaaccctcagacaaaggagcccaaactcgatcgcgcaaggaggcaggtcccagaatggactgtctacgatgaggagattgcggcgctggatcgtcgtcgcaagggtattgaaggtaaggatgagaagaacgcgaagagcaggacgatggaggaggaagtgcatacaaaggacgagctttga

SEQ ID NO: 39 - protein, 1462 aa, Fusarium solani
MFRLSQLPWGLAMALVASLATASPAVNVGMNAAFPRGPYLLELLETAAGENSTSYFPLLDKIASGHFASASSDAELYDQFLEVLQQDGHIASPDALSTFKLALSLRSAAPRIEAHYQYYSTAVDPTTKEDVDEKCQSWALVENEKYCSPTLDTAAESDLSSKQTNVLPFDRVLGIGKDAVLYADPTSASFGPFHETLSKAAKQGDISYRLRYRRSTAQSSPLPVSGYGVELALKRTDYIVIDDREAGKDATQKPVAADVVLDEEEEVTDLKPLSTSELASLGLKTASFILKSENPFETLVKATQDFPKFSRSIIAHEVSKEFKEEQEKNVAAGVPTGINFLWMNGVQLIERQIEPFNLIDMIRRERKLINGVRALGFNGQQAVSLLGHSEIANAKADDEPTRFDWTDRSEDGKVFIWLNDLEKDDQYAELPKELKALLRRTYPGQLPQVALNLFHIIAPVDFTNLQDVRAFSQLAQFMQRGLTIRFGIAPLTSTPAAAAAGKIAYHLMETYGLESLVAYLSECEEGSKTGVDKKAFVKAVEGREPLPETTKMTLDEVLEAESYTQKIKAAQSWASRLNADTTVRPVFVDGFAIPREKNWVQTMGQRLTEDTQVIQKAVYLGEIDEESWVPGVFLNKALAKRNTYIFPDDDKSLRVLDVNKLYADHADLFSKVAVLEANTESTKETWAVLTVVTDLNTEDGQDLLVSALQFKRANPGLRLELVHNPSSPTDAHAVNGAFKTNTAKLAEIESKDELKGILEASWTGEDDGFGNSLAGFLNTAKILPGTKALLLNGRVVGPLPSNVLFKEDDLQQLLDFEQRNRILPVYAAIEDLGFADKLSDPVAAAKLTSITALSTISDLPQGIFESAPSVRTTLYSTWDSTHTAIEIGNPETASIHIAGLLNPTSEQGQKWAPILKVLSELDGVYLKLIINPKEVVSELPIKRFFRYVLNSAPSFDKDGHVEGPKAVFKGLPSEALLTAGMDVPPAWLVAPKASVHDLDNIKLSSVKADVDATYELENILIEGHSRDGKRGAPRGAQLVLATEKDPLVTDTIIMANLGYFQFKANPGYYNIQLKEGRSADIFTIESVGAQGYSAVPGDEGTEVALMDFKGTTLYPRLERKPGMGEADVLATTDDEDKGIVAKGLKFAESLLGASKTHKEISAQEHAEINIFSVASGHLYERMLNIMMVSVMRNTKHTVKFWFIEQFLSPSFKDFIPHMAAEYGFKYEMVTYKWPHWLRQQKEKQREIWGYKILFLDVLFPLSLDKVIFVDADQIVRTDMIDLVNHDLKGAPYGFTPMCDSRTEMEGFRFWKQGYWANYLRGLPYHISALYVVDLHRFRQLAAGDRLRQQYHTLSADPNSLSNLDQDLPNNMQFTIPIHSLPQEWLWCETWCSDESLSSARTIDLCNNPQTKEPKLDRARRQVPEWTVYDDEIAALDQRRKGTEEKNTKSRKLEEEMHTKDEL

SEQ ID NO: 40 - DNA, 4389 bp, Fusarium solani
atgtttcgcctttctcagctaccatgggggcttgcgatggccctcgtggcttctctagcgactgcatctccagctgtcaacgtgggcatgaacgctgcctttcctcgtgggccatatctacttgaacttctggaaacggctgccggagaaaactcgacttcgtactttccactccttgacaagatcgctagtggccatttcgcatcagcaagctcagacgccgagctctacgatcagttcctcgaggtcctgcaacaagacggccatattgccagcccggatgctctgtcgaccttcaagctagctctctccctgcgatctgcggcgccacgaatcgaggctcattaccaatactattcgactgccgttgaccctacgacaaaggaggacgtcgatgagaagtgccagagctgggctctggtcgagaacgagaagtactgctcgccaacgcttgatactgcggcagagagtgatctatcatccaagcaaaccaatgtgttgccctttgatcgagtattgggcattggcaaagacgctgttctctatgctgaccctacgtctgcatcatttggcccctttcacgaaactctttcaaaggctgccaagcaaggagacatctcctatcgccttcgataccgccggagtaccgcccagagcagccctcttcctgttagcgggtatggtgtcgagttggccttgaagagaaccgactacatcgttattgacgatcgcgaagccggtaaagatgccacgcaaaagcccgtcgccgcagatgtagttcttgacgaagaggaggaagtcaccgatttgaagcccctatcgacctcggagctggcatccttgggcttgaagactgcctcgttcattctgaagagcgaaaatccgttcgagaccctggtcaaagctacacaggacttccccaagttttccaggtcgatcatcgcccacgaggtctccaaagagtttaaagaggaacaggagaagaatgtcgcagccggcgttcccactggcatcaacttcttgtggatgaacggagttcagctcattgagcgccaaatcgaaccgtttaaccttattgatatgatccggcgcgagcgcaagctgatcaatggtgttcgtgcgcttggtttcaatggccagcaggctgtctcgttacttggacactcggagatcgccaacgccaaggcagatgatgaacccactagattcgactggacagatagaagcgaagatggcaaagtcttcatttggctcaacgatctcgagaaggatgaccaatatgcggagctaccaaaagaactaaaggcacttctccgacgcacttatcccggccagcttccccaggtggctctcaacctcttccacattattgcgcctgtggattttaccaatcttcaggacgtaagggcatttagccagctggcacagtttatgcagcgcggtctcaccattcgctttggcattgcccccctgacatccacgcccgcagctgctgcggcaggcaagattgcctatcacttgatggaaacatatggtctcgagtctctagtcgcatatctttcagagtgcgaggagggctccaagaccggtgtggacaagaaggcttttgttaaggctgttgaaggacgtgaaccgctgcccgaaaccacgaagatgactttggatgaggttcttgaagccgaatcttatacgcaaaagatcaaagcagctcagtcctgggccagccgactcaatgcagacacgacggtgcgccccgtattcgtcgatggctttgctattccacgcgaaaagaactgggtgcagacaatgggccagcggttgaccgaagacactcaggtcatccagaaggccgtctaccttggggagatcgacgaggagagctgggttcccggtgtcttcttgaacaaggcgctcgccaagagaaatacttacatcttccccgatgatgataaatctctccgcgttctcgatgtcaacaagctctacgccgatcatgctgacctgttcagcaaggttgctgttctcgaggccaacactgagtcgacaaaggagacctgggctgttcttactgtcgtcactgacctcaacacggaagatggtcaagatcttctcgtttctgcccttcagttcaagcgtgccaacccaggtcttcggcttgaacttgtccataacccttcatcgcccactgacgcgcacgctgtcaacggtgcattcaaaaccaacacggcgaaacttgccgaaatcgaaagcaaggatgagcttaagggcattcttgaggcgtcatggacaggcgaagatgatggattcggcaactccctggcaggcttcctcaacactgccaagatcctgccaggaacaaaagccctccttctcaacggccgcgtcgttggtcctctgccatccaatgtcttgttcaaggaggacgacttgcagcagctccttgactttgaacagcgaaacagaatcctccctgtttatgctgccatcgaggacctcggtttcgcggacaagctgtcagaccctgttgcagcggcaaagctcacctccatcactgcactctccaccatctccgaccttccacagggcatctttgagtctgctccgtccgttcgaaccacactctatagcacgtgggactcgacacataccgcaattgagattggcaacccagaaactgccagcattcatattgctggtctcctgaaccccaccagcgagcaaggtcagaagtgggctccaattcttaaggtcttgtccgagctagatggtgtttaccttaagttgatcatcaacccaaaggaagttgtgtcagagcttcccatcaagcgtttcttccgctatgttctcaactcagccccctcttttgacaaggatgggcatgtcgagggccccaaggctgttttcaagggccttccctcagaggctcttctgacagcaggcatggatgtccctccagcttggcttgtggctcccaaggcctccgttcacgatctcgacaacatcaaactcagttccgtcaaggccgatgtggacgcgacatatgagctggagaacatcctcattgagggccattccagggatggcaagcgaggcgctccccgtggtgctcagctggtcttggcaacggaaaaagaccctcttgtaactgataccatcatcatggccaaccttggatacttccagttcaaggcgaaccctggttactacaacattcagctcaaggagggccgcagtgctgacatctttaccattgagagcgtcggcgcccagggttactctgctgtccctggagatgaaggtacggaggttgcgcttatggacttcaagggtacaacgctgtatccgcgattggaacgaaagccaggcatgggagaagccgacgttctcgcaacaactgatgatgaagacaagggcattgttgcaaagggcctcaagttcgccgagagtctccttggtgcatccaagacgcacaaggagatttcggcacaagaacacgccgagatcaacatcttcagtgtcgccagtggccacctctacgagcgtatgctcaacatcatgatggtttctgtcatgcgcaacaccaaacacaccgtcaagttctggttcattgagcaattcctctcaccctcgttcaaggactttatcccacacatggcagccgagtacggattcaagtatgagatggtgacatacaagtggcctcactggcttcgtcagcaaaaggagaagcagcgtgagatttggggttacaagatccttttcctcgacgtgctgttcccactatcactcgacaaggtcatctttgtggacgcggaccaaatcgtccgcaccgacatgattgaccttgtgaaccacgacctcaagggagcaccgtatgggttcacccctatgtgcgactcgcgtactgagatggagggcttccggttctggaagcagggctactgggcaaactaccttcgtggcctcccctatcacatctcggccctctacgtcgtcgacctgcaccgtttccgtcagctcgcggctggagaccgtctcagacaacagtaccacaccctctcggccgaccccaacagcttgtccaacctggatcaggacctgcccaacaacatgcagttcaccatccctatccacagtcttccccaggagtggctctggtgcgagacgtggtgcagcgacgagagcctctcctcggcccgcactatcgatctgtgcaacaacccgcagaccaaggagcccaagcttgaccgcgcaagaagacaggtccccgagtggaccgtctacgatgatgagattgcagcactggatcagcgacgtaagggtactgaggagaagaataccaagagccggaagctagaggaggagatgcatactaaggacgagctctag

SEQ ID NO: 41 - protein, 1515 aa, Gaeumannomyces graminis
MLRLWRLPRGLAAAMLAAMLHLQLPVAAGAPSVEVSMQAAFPSPPYLLELLETAAQENSTAYFPLLDRIASGHFAKAASDKELYETFLQLVQDDGHITSPDALSTFKLALSMRSAAPRIEAHYQHYRTAVEPKVKGKVDNCPEWTLQSGEAICSLDKPQAVAVISGRLLERDVSFDVRLGNDDTGIILYADITSPTFGSVHQILATAARNGGPSYRLRYRRISKATEEPEPLPLSGYGVELALKRTDYIVIDDRGSEKDKSEDASAKKSQVAAEVVLDGDEDVSDLKPLSASELEELGLKAADFILHSDKPFEMLLKLTQDFPRFSNPVAAHNVSEGFRSEHYANHLQLLQSGQNVLWMNGMQLHDRQIQSFGLVDVLRKERKLINEVRALGLSGRNAVDLLSHSAVASSKADDEPPRFDWTDQTEEGMAIIWMNNLEKDKRYSSYSPSLMALISGGMPGQLPPCRKDIHNIVLPVDLAQKADMTLVVSKILNFVKQRIPIRFGLVPLTPTPESVQQAKVAYHLLQSYGLASLISYVEAMVEAGAAGAPDQKAFDAAIQDRSLRSDAEALTLDQVLASEAYASQVAFAGKWANRLGANSVVPPLFVNGFAIPRDSEGNWMNAMSNRVMGDLRSVQQGVYYQMISSETWVPSLFLENAAARRNRFIFPEGGKSLTILDVNKIYSEHDDLFSRAVVVDAEQDAAKDTWAVLTVVSDLEGKDGRELLLSALRFRASNPGVRLDIVHNPVWRTSHNINSNLKGKMQELLAADSEGALAAILDEVANSPQINNGLEYAVALERFQKAAAIQPTESMLLLNGRMVGPIASAAEFGEDDFKTLLDFEQSNRILPVFKALEELGLEDKLTDPVAAAKLTSLTALSTISDVPDGAFETPSMLRISSFSIWNSAYTAFEVGDPAKATIFFTAIIDPASELGQKWAPLLKVLSELEGVHLKVFLNPKDKLEELPVKRFYRFVMESTPKFDKSGKLEAPTALFKGLPSEALLNLGMDVPPAWLVAPKVSIHDPDNIKLSTIGSDVKALYELEHILIEGHARDPKGSSVRGVQLVLGTESNAHLADTLIMDNLGFFQFKANPGLYKIQIEEGRSSELFYLESIGAHGFAPIAGDESAETAVLDFLGTTLYPRLRRNTGMEDLDVLEDSKAAAASTGAGAAMEFVNKGLKFAESLLGGGKDKQKVVTRSEQAEINIFSVASGHLYERMLNIMMVSVMRHTKHTVKFWFIEQFLSPSFKDFIPHMAAEYGFQYEMVTYKWPHWLRQQKEKQREIWGYKILFLDVLFPLSLDKVIFVDADQVVRADMYELVTLDLQGAPYGFTPMCDSRTEMEGFRFWKQGYWERYLKGLPYHISALYVVDLRRFRELAAGDRLRQTYHSLSADPQSLSNLDQDLPNHMQFSIPIHSLPQEWLWCETWCSDESQSAAKTIDLCNNPQTKEPKLDRARRQVPEWSVYDNEIAALDRRRKGLPPIEEASNGAAKAEKNPKSRTLEGEEAVAPPPENTHVVDEL

SEQ ID NO: 42 - DNA, 4548 bp, Gaeumannomyces graminis
atgctccggctttggaggctccctcggggccttgcagccgcgatgctggctgctatgctccacttgcagctgcctgtagcggctggagcaccctcggtcgaggtttccatgcaggctgctttcccctcgccgccatatctccttgagctgctagaaacggctgcccaggagaattcgaccgcctactttcccctccttgaccgcatcgccagcggccactttgccaaggcagctagcgacaaggagctatatgagacgttcctgcagctggtccaggatgacggccacatcacaagccccgatgccctctccaccttcaagttggctttgtccatgcgctcggccgcgccacgcatcgaggctcactatcagcactacaggaccgccgtagagcccaaggttaagggcaaggttgacaactgcccagagtggactctacagtctggcgaggctatctgctcgttggacaagccccaggccgtggctgtgatctcgggcaggttgttggagagagatgtgtcgttcgacgtgagactggggaacgatgatacgggcatcatcttgtatgccgatattacctccccgacctttgggtccgttcaccagattctggctaccgctgccagaaatggcggcccttcgtaccgactgcgctaccggaggatatcgaaggccaccgaggagcccgagcccctacctctgagcggctatggtgtcgagctggcgctgaagaggaccgactacatcgttattgacgacagggggtccgaaaaggacaagagcgaggacgcgtcggcaaagaaatcccaggtcgctgccgaggtcgtgcttgatggtgacgaggacgtaagcgaccttaagccgctgtcggcctcggagcttgaagagctcggcctcaaggcggccgatttcattctgcacagcgacaagccgtttgagatgctgctgaagctcacgcaggacttccccaggttctcgaaccctgtggccgctcacaacgtctctgaagggttccggtcagagcactacgcgaatcacctacaactgctccagagtggccagaacgtgctgtggatgaacggcatgcagctgcacgatcggcagatccagtcctttggtctcgtcgatgtacttcgcaaggagcggaagttgatcaacgaggtccgggctctgggcttgtcgggtaggaatgctgttgatctgctctctcactcggccgtggcctcgtccaaggctgacgacgagcctccccggtttgactggaccgaccagactgaggagggcatggccattatctggatgaacaacctggagaaggacaagcgctacagcagttacagcccgagcctgatggctttgatctcgggcggcatgcccggacagctgcctccttgccgcaaggatatccataacatcgtcttgcctgtcgatctcgcccagaaggccgacatgacgctggtcgtatcaaaaatcctcaactttgtcaagcagcgcattcccatccgcttcggtctggtgccgctcacgcccacccctgagtcagtgcagcaggccaaggtggcatatcacctacttcaatcctacggcctggcgtctttgatctcgtacgtcgaggccatggttgaggccggcgcggccggtgccccggaccaaaaggcgtttgatgccgccatccaggaccgctccctgcgctcagacgcggaggccctcacgctcgaccaagttctcgcatcggaggcttatgcatcccaggtcgcattcgcgggcaagtgggccaaccgactgggcgctaactcggttgtgccgccccttttcgtcaacggctttgctatccctcgcgattccgagggcaactggatgaacgccatgagtaaccgtgtcatgggcgatctcaggtcggtgcagcagggcgtttactaccagatgatcagctccgagacctgggtgcccagcctcttcctcgagaacgcagcagcccgacgcaaccgcttcatcttcccagagggcggcaagtctctgacgattctcgacgtcaacaagatctactctgagcatgatgatctgttcagccgtgctgtcgtcgtcgatgcggaacaggatgctgccaaagacacttgggcagtgttgactgtcgtctcggacctggaaggcaaagacggccgggagctgctcctttcggccctccgcttccgcgccagcaaccctggcgtgcgccttgacattgtgcacaaccccgtttggaggacctcccacaacatcaacagcaatctgaaggggaagatgcaggagctgttggccgccgactccgagggcgcccttgcggccatcctggacgaagtcgcaaatagcccgcagataaacaacggtctcgagtacgcggttgcgctcgagaggttccaaaaggcggcggcgatccagccgactgagtcgatgctgctgctgaacggccgtatggtcggccccattgcgtcggcagctgagttcggagaggatgatttcaaaacgctgttggatttcgagcagagcaacaggatcttgcccgtcttcaaggcgcttgaggaacttggccttgaggataaactaacagacccggtcgccgccgccaagctcacatcgctcacggcgctgtccaccatctcggatgtaccggacggcgcgttcgagaccccgtccatgctgagaatatcgtcctttagcatttggaattcggcttatacagctttcgaggttggcgacccagccaaggccacaatcttcttcaccgccatcattgaccctgccagcgagctcggccagaagtgggcgccgctgctcaaggtcctgtcggagctggagggagttcatctcaaggtgttcctgaaccccaaagacaagctcgaggagcttcctgtcaagcggttctaccgattcgtcatggaatccactcccaagttcgacaagtcaggcaagctggaagcgccgaccgctctgttcaagggcctgccgtcggaagcgctgctgaacttgggcatggatgtgccgccggcgtggctcgtcgcccccaaagtgtcgattcacgacccggacaacatcaaactcagcactatcggcagcgacgtcaaggcgctctacgagctcgagcacattctcatcgagggccatgcccgcgatcccaaagggagctcggtgcggggcgtgcagctggtgctgggcaccgagtccaacgcgcacctggctgacacgctcattatggacaacctgggctttttccagttcaaggccaaccccggcctgtacaagattcagatcgaggagggtcgtagctcggagctgttctacctggagagtatcggcgcacacggcttcgcccccattgcgggtgacgagtcggccgagacggcggttctggacttcctcggcacgactctgtacccgcgcctgaggcggaacacgggcatggaggacctggatgtgctcgaggacagcaaagctgcggcagcctcgactggcgctggcgcagcgatggagtttgtcaacaagggactcaagtttgccgaaagccttctaggcggaggtaaggacaagcagaaggtggtgaccaggtcggagcaggccgagatcaacatcttctctgtggccagcgggcacctgtacgagcgcatgctcaacatcatgatggtcagcgtgatgcggcacacaaagcatacggtcaagttctggttcattgagcagttcctgtcgccatcgttcaaggacttcatcccgcacatggcggccgagtacgggttccagtacgagatggtgacgtacaagtggccgcactggctgaggcagcaaaaggagaagcagcgcgagatttggggctacaagatcctgttcctcgacgtgctcttcccgctctcgctcgacaaggtcatctttgtggacgcggaccaggtggtgcgggccgacatgtacgagctggtaacgcttgacctgcagggcgcgccctacggcttcacgcccatgtgcgactcacgcaccgagatggaagggttccgcttctggaagcagggctactgggagcgctacctcaagggcctgccctaccacatctcggcgctctatgtcgtcgacctgcgccggttccgcgagctcgctgcgggcgaccggctgcggcagacgtaccactcgctctcggccgacccgcagtcgctatccaaccttgaccaggacctgccgaaccacatgcagttctccatccccatccacagcctgccacaggagtggctgtggtgcgagacgtggtgcagcgacgagtcccagtcggccgccaagacgatcgatctctgcaacaatccgcagacaaaggagcccaagctcgaccgcgcgcgcaggcaggtgcccgagtggtccgtctacgacaacgagattgctgccctagaccgcaggcgcaagggcctgcccccgatcgaggaggccagcaacggcgcagccaaggcggagaagaaccccaagagtcggacgctggagggagaggaggcggtggcgccgccgcctgagaatacgcatgtcgtggacgagctgtag

SEQ ID NO: 43 - protein, 1508 aa, Leptosphaeria maculans
MRAAASLLSARTFLALSTYAHIAASERQSINVALRAAFNPAPYLVELLETAAEENATAYYPILDRVSQGYFDDKNTEQDLYTAFVDLLRNDGHITEPEALASFNFALSVRSAAPRIEAHYQFYKTSVEPSLAAEQTTDCELWVSFHGKQYCSPTLEEPLGGIKSERTYELPFDRILGNSSALPAILYADITAPRFKKWHETLSETARQGKTSYRIRHKPSSKAPQSPLIVNGYGVELQLKRTDYIVIDDRPKAEGDNVADQKPLGTVLDEQEEITDLKPLSKEEVADLGPKAASFVMQSEEPMDTLLRLVQDFPKYSTIIASRNASENFLKEHFNNRELLLPTGYNIIWVNGVQIPARDVNPHSLLAHLRRERKLINGIRNQGLSGPDTISLLSHQAIAETQTEDEPQRYDFRDAAEGGNVIIYMNNIEKDSRYESWPTELRALLQRTYPGQLPSVRRDIHNAIMPVDLTSAGEVSIILDTMLSLIKRGIPVRWGFVPQTTTPGSLDQAKVIYYLQNSYGLSTVIKYLTASVNAKKLAAPNKTIFDTTVKGAKLRNEREALELADVLTSEAIQARIDASKQYLHRLAADKSNAPMFVNGVPIPLTEDWLSILSQRIGLDLRQIQKGVFESVISENSWVPQHFLFQAATKRNPLIIPEDEKNIQLINMAEFEELYGKALSSMPRVAATDLSSKSEWVHITLVADFDSKSGLALLKSVADFRDTKPNAEIVLIHNPQPGSMQSSASETLLDVYGNLGGEVTSEALWAVANEPADTRATREESRTLWKTVEPIYEALGLAPGQHGILVNGRFIGPIPEDQVFSLGDVETLVTYEMAKRIQPLSKAIEDLGLAQKLKTPFEVAKIQSLVALSTVSDVPEGIFETVSTLRISTFNNWASEHTAITKGDQDKAVFQIVASIDPASELAQKWVPILNTLSDMDGVQLKLFLNPRQSMQELPVKRFYRYILGARPHFNADGSVGHLKAQFSGIPKDALLNLGMDVSPSWLVAPEESIHDLDNIKLSSLPARTNIDAIYGLESILIEGHSRDTTNGGEPPRGAEVVLSTEKDPHFADTIIMANLGYFQFKANPGFYNIQLKSGRSREIFNLDSAGTKSYAAQPGDETTEIVLMSFQGATIFPRLSRKPGQETADILASEESLTSELVGKGTHKVNKLLGKIGLNFNSEKVLQKGAELLSGGKSGKKGTQADINIFSVASGHLYERMLNIMMLSVMKHTKHTVKFWFIEQFLSPSFKSFLPHMASTYGFEYEMVTYKWPHWLRGQTEKQREIWGYKILFLDVLFPLDLEKVIFVDADQIVRTDMYELITHDLEGAPYGFTPMGDSRTEMEGFRFWKTGYWANFLRGKPYHISALYVVDLVRFRQLAAGDRLRQQYHQLSADPNSLSNLDQDLPNNMQFQLPIHSLPKEWLWCETWCSDEDLATAKTIDLCNNPQTKEPKLDRARRQVPEWTVYDEEIAALAKKVKGEAGVKAVEVDIQEEEQRREKREKDEERKRDEL

SEQ ID NO: 44 - DNA, 4527 bp, Leptosphaeria maculans
atgcgggctgcagcctctttgttgagcgcgaggactttccttgccctcagcacatacgcacacattgcggcttcggaaaggcaaagcataaatgttgctttgagagctgctttcaacccagcaccctatctagtagagttattggaaacagccgcagaagagaatgcaaccgcctactacccaatcctcgaccgcgtgtcgcaaggatactttgacgacaagaacacagagcaggatctctacacagcctttgtagatttactccggaacgacggccacattacagagcccgaagccctcgcctcgttcaatttcgccctctcagtccgttcggctgcgcctcggatagaagcacattaccagttctacaagacctctgtagagccatctttggctgccgaacagacaacagactgtgagctatgggtatcatttcatggaaagcagtactgctcgccaacactagaggagccactgggtggcatcaagagcgaaagaacctatgagctgcccttcgaccgtatacttggaaacagttcggcccttcccgccattctctacgccgatatcacggcccctcgattcaagaagtggcacgagaccctgagtgagacagcaagacaaggcaagacgtcatatcgcatccgccacaaaccctcgtcaaaggcaccgcagtcgccactgattgtcaatggctacggtgtcgagttacagctgaagcggaccgactacatcgttatcgacgaccggccaaaggcagaaggagacaacgttgcagaccaaaagccattgggtacagtcctagatgaacaggaagaaatcacagatctgaaacctttatccaaagaagaggtagcagatcttggcccgaaagctgccagtttcgtcatgcagagcgaagaaccaatggacacgctgctgagactggtccaggatttccccaaatactccaccatcattgcatcgcgcaacgcctctgaaaacttcttaaaggagcactttaacaaccgtgagcttcttctcccaacaggctacaacatcatttgggtcaatggtgtgcagatcccagcccgcgatgtgaacccacattccctcttggcgcatctcaggcgagaacgaaagcttatcaatggaatccgtaaccagggactctcaggccctgatacgatctcacttctatcacatcaggctattgcggagacccagacggaagatgagccgcagcgctatgacttccgcgatgcagctgaaggtggcaatgtgatcatctacatgaacaatattgagaaggactcaagatatgagtcttggcctactgagctacgagctctgctccaaagaacatatcctggccaactgccatctgttcgtcgcgacatccataacgctattatgcctgtcgatttgacctctgctggtgaagtctctatcattctggacacgatgcttagcttgatcaagcgcggcattccagttcgatggggtttcgtccctcagaccacgactccaggtagtctggatcaagccaaggtcatttactatttgcagaatagctacggcttgtccactgtaatcaagtatctgacagcgtcagtaaatgccaaaaagctcgctgctccgaacaagaccatttttgacacaactgtgaaaggggctaagctgcgaaacgagcgcgaggccctggagctggcagatgtcctgacttcagaggctatacaggcgcgcatagatgcatctaaacaatacctccaccgcctggcagcagacaagtcaaatgccccgatgtttgtcaatggtgtccctattccgctaaccgaagattggctttccatccttagccagcgcatcggactggacttgcgtcagatccagaagggtgtctttgaaagcgtcatcagcgaaaacagctgggtacctcagcatttccttttccaggccgccactaaacgtaatccattgatcattcccgaagacgagaagaacatccagctcatcaacatggctgaattcgaggagttgtatggaaaagcgttaagcagcatgccacgagttgcagcaacagatttatcgagcaagagcgaatgggtccacattacacttgtcgcagactttgactcgaaatctggtcttgcattgttgaagtctgtagcagacttccgcgatacgaaacccaatgcggagatcgtcctgatccacaatccacaacccggctcaatgcagtccagtgcgtcggaaacgcttctggatgtatatggtaatttgggtggtgaagtcacaagcgaagcactatgggcagtggctaatgagccagccgatacaagagccacccgtgaggaatccaggacactctggaaaactgtcgagccaatctatgaagctttggggcttgcaccaggtcagcatggcatcctcgttaatggtcggttcatcggtcccattcccgaagatcaagtattttcactaggtgacgtcgagactctcgtgacatacgaaatggcgaagcgcattcaacctttgagcaaagctattgaagatctaggcttggctcagaagctgaagactccttttgaagtagccaagattcagtccctcgttgcgctttcgacggtgtctgatgttccagagggcatattcgaaacagtatctactttgagaatcagtactttcaacaactgggcttccgagcacactgccatcaccaaaggtgatcaagacaaggctgtcttccagatcgtagcttcaatcgatccagcttcggagctggcacagaagtgggtgccgatattgaacacgctgagcgacatggatggtgtccagctcaagcttttcctcaacccgagacaatccatgcaagagcttcccgtcaaacgattctataggtacattcttggcgctcgccctcacttcaatgcggatgggtcggtaggtcatctgaaagcgcaattttctggcattcccaaagacgcattattgaacctgggtatggacgtgtcaccctcctggcttgttgcacctgaagaatccattcacgatctggacaacatcaaactcagctcactcccagctcgaaccaatattgatgccatctatggactagaaagtatcttgattgagggtcactctcgtgacactacaaacggtggagagccacctcgtggagctgaagtcgtcctttccaccgagaaagatcctcattttgcagacactattatcatggccaatcttggctacttccaattcaaggctaacccgggtttctacaatattcaactcaaatctggccgctcccgcgaaatcttcaatctcgacagcgctggcacgaaatcgtacgctgcacagcccggcgatgaaaccactgagattgtcttgatgagtttccagggtgccaccatttttccccgactgtcccgcaagcctgggcaggaaacagctgatatattggcttccgaggagtctctgacctctgaactcgttggcaaagggacacataaggttaataaactgcttgggaaaatcgggctaaacttcaattccgagaaggtcttacaaaaaggcgccgaactcctgtctggcggcaaatcagggaagaagggcacccaggccgacatcaacatcttttccgttgcctcgggccacctttacgaacgcatgctcaacatcatgatgctgtctgtcatgaagcataccaaacacacggtcaaattctggttcattgagcaattcctttcgcccagcttcaaatccttcctcccccacatggcatcgacctacggtttcgaatacgaaatggtaacctacaaatggccacactggttgcgtggccagacggaaaaacaacgtgagatctggggctacaagatcctcttcctcgatgtcctcttcccgctcgatctggaaaaagtaatcttcgtggacgcggaccagatcgtgcgcacagacatgtacgagctcatcacgcacgacctcgagggcgccccctacggcttcacccccatgggcgactcgcgcaccgaaatggaaggcttccgcttctggaaaaccggatattgggccaacttcctccgcggcaaaccttaccacatctcggcactctacgtcgtcgacctcgtccgcttccgccaactcgccgccggcgaccgcctccgccaacaataccaccagctctcggccgacccaaacagcctcagcaacctcgaccaggatctccccaacaacatgcaattccagctgcccatccacagcctgcccaaggaatggctctggtgcgaaacctggtgcagcgacgaggatctcgcaaccgcaaagacgattgacttgtgcaataacccgcagaccaaggaacccaagctcgatcgcgcgaggcgccaggtgcccgagtggacggtgtatgatgaggagattgcggcgttggcgaaaaaggtcaagggtgaggcgggggtcaaggcggtcgaggtggatatccaggaggaggagcagaggcgcgagaagagagaaaaggatgaggagaggaagagggatgagttgtga

SEQ ID NO: 45 - protein, 1508 aa, Magnaporthe oryzae
MIYLSRLPWGLRVSLLAALAQLQFVPLAAGAPSVEVSMQAAFPSPPYLLELLETAAQENDTAYFPLLDRIASGHFAKAGTDRELYEKFLQVLQEDGHITSPDALSTFKLALSMRSAAPRIEAHYQHYRTAVEPKFQGKADSCPEWILKSGEIFCSVDETKGVANIVGDALSKDIPFDHQLGDGSEGVILYADITSPGFGAFHDTLATAARNGGPSYRLRHRSITIASKQPLYLSGYGVELALKRTDYIVIDDRANEKTTQDDSTQKPLVGGSSEIVLNGDEEVADLKPLSASELEELGLKAADFILRGDRPFETLLKLTQDFPKYSASVSAHNVSTGFRTEHSANRMLLQIPSGSNILWMNGVQLIERQIQSFGLVDVLRRERQLINEARSLGLSGQEAVDLLSHSDVASSKASDEPARFDWRDEKEDGKVIVWLNNLEKDKRYENYSPHIMTLLSGGIPGQLPPIRRNIFNIVLPVDFSRASDMALATSQLIGFVKQRIPIRFGLVPLATTTEAEDQAKVVYHLLQTYGLSSLMAYLELCLDGSTTGPNQEAFDAAIKDRTVRSELTALSLKDVLASEAYTNQVTLAKQWSSRLGAHSAVPPLFVNGFALPRDSENRWMGMMSGRISGDLRSLQEGIYYGTINDETNVPEIFLADASSRRNHYIFPENDNGLTILDVNKVYTDHDDLFTKAAVIESSPDFDREAWALLTVFVDLDSKDGREILLSALRFRRSNPGVRLEIVHNAVKKTSHDINSNLKEQSDRLLAAESDEGLVAILEEIRHAPQTNIGLEYAQALERFQRAAHFEPGTSILMLNGRVVGPIQSASEFSESDFQTFLEFEQNSRIIPVYKALEELGLGDRLSDPVAAAKLTSITALSTISDLPDGAFENPPTLRISSFKLWNSTHTGFEVGDPSKASIFFTAVIDPASELGQKWTPLLKVLSELEGVHLKVFMNPRDRLEELPVKRFYRFVMDSAPVFDEAGKLEVPSASFKGLPSEALLNLGMDVPPAWLVAPKVSVHDLDNIKLSSVTSDVTAIYELENILIEGHARSTDSGTPRGVQLVLGTESNPRVADTIIMANLGYLQFKANPGIYDITLEKGRSSDIFYVESIGAHGFSPVAGDETTEVALLDFLGTTLYPRLRRNPGKENLDVLEESGAAPSGNAGGAMDFVNKGLKFAESLLGGAKGKAKEKSPSELQHAEINIFSVASGHLYERMLNIMMVSVMRHTKHTVKFWFIEQFLSPSFKDFIPHMAAEYGFKYEMVTYKWPHWLRQQKEKQREIWGYKILFLDVLFPLTLDKVIFVDADQIVRTDMYDLVQLDLQGAPYGFTPMCDSRTEMEGFRFWKQGYWERYLKGLPYHISALYVVDLRRFRELAAGDRLRQTYHTLSADPNSLSNLDQDLPNHMQFSIPIFSLPQEWLWCETWCSDDTQPMAKTIDLCNNPMTKEPKLDRARRQVPEWNVYDAEIAAVDRKRKGLPVSGDAASEQAAKNPKSRTLAVEPENTHIVDEL

SEQ ID NO: 46 - DNA, 4527 bp, Magnaporthe oryzae
atgatatacctttcacgactcccatggggccttcgggtttccctgttggctgcgctcgcccagctacaatttgtcccgctggctgctggagctccgtcggtcgaggtgtctatgcaggccgcctttccatctcctccatacctgctggagcttctcgaaactgcagcacaagaaaacgacaccgcctattttccactcctcgatcgcattgcaagcggtcacttcgccaaggccggcactgaccgggaattgtacgagaagttcctccaagtattgcaagaagatgggcatatcacgagccctgatgcgctgtctactttcaagctggcgctgtctatgcgctcagctgcaccccggattgaggcccactaccaacactacagaactgcggttgaacctaagttccagggcaaggccgacagttgtccggaatggattttgaaatctggagagattttctgctcagtcgacgagacgaaaggagtggccaacattgtgggggatgcactgtcaaaagatataccttttgaccaccagctaggcgatggttcggaaggggtaattctttatgcggatatcacatccccgggctttggtgctttccacgacacactggcaacggcggcgcggaacggaggtccctcatacaggctgcgacacaggagcatcaccattgcctcgaagcagcctctttacctcagcgggtacggtgttgagttggcattgaaaagaaccgactacattgtcattgacgacagagcaaacgaaaagacaacccaggacgattctacccagaagccgctggttggtggctcttctgagattgtccttaacggcgatgaggaagttgcagatctgaagcctctatcagcttctgaactcgaggagctaggattgaaggcagcagatttcatcctccgcggcgacagaccgttcgagacactgttgaaacttacacaggacttcccaaagtattcggcatctgtgtcggcccacaatgtatccacgggattccgcacagaacatagtgccaaccgcatgcttctgcaaataccatccgggtccaacatcttgtggatgaacggtgttcagctgattgagcggcagattcagtcatttggtctggttgacgttctacgaagggagcgccagctaatcaatgaggcccggagtttgggtctgtctggccaagaagctgttgatctcttgtctcattcagatgttgcgtcgtcgaaagccagcgatgagcccgctcgctttgactggcgagatgagaaagaggacggcaaggttattgtatggctcaacaatctcgagaaggacaagcgttacgagaactacagcccacacataatgaccttattgtctggtggaattccgggtcaacttccccctattcgtagaaacattttcaacatcgttcttcctgtggatttctcaagagcatctgacatggcattggcgaccagccaactcatcggtttcgtcaaacaacgcatcccaatccgctttggcttggttcccctcgcaactactaccgaagcagaagatcaggccaaggttgtctaccacttgttgcaaacatatgggttgtcatccctgatggcttatctcgaattatgccttgacggaagtacaacgggtcccaaccaggaggcgttcgacgcggctatcaaagaccgcacagtgcgttccgagttgacggccttgtcgctcaaggacgttctggcatctgaggcgtacaccaatcaagtgactctcgcgaagcagtggtcatctagacttggtgcccactctgcggtaccacctctttttgtcaacggttttgcccttcctcgggactcggagaacagatggatggggatgatgagcggccgaatctccggtgacctgcggtcgctgcaagagggtatctactatggtaccattaacgacgaaacaaatgtgcctgaaattttccttgcggatgcttccagtcgtcgtaaccattatatcttcccagaaaacgacaatggcctgacaatcctcgacgtaaacaaggtttacaccgatcatgatgatctattcaccaaagccgcggttatcgagtctagtccagactttgacagggaagcctgggctctcttgacagtctttgttgatctggacagcaaggatgggcgtgaaattcttctgtcagccctacgattccgcaggagcaaccctggtgttcgactcgagatcgtccacaacgctgtgaagaagacatctcatgacattaacagcaatctcaaagagcagagtgaccgtctactcgcggccgagtctgacgaaggtcttgttgcaatcttagaagagatccgacatgcaccccaaaccaatattgggcttgagtatgcccaagctttggagagattccagagagcagcgcattttgagccaggtacctccattttgatgctgaacggacgcgttgttgggccaatccaatcagcttctgagtttagcgagtctgatttccagaccttcctcgaatttgaacaaaactctaggatcattccagtgtacaaggcacttgaggaactgggacttggggataggttatcagatccagtggcggcggccaagttgacttcaataaccgccttgtctaccatctctgatctgccagacggtgcgttcgagaatccccccactctaaggatatcatccttcaagttatggaactcgacacacacaggctttgaagtcggtgatccctccaaggcttcgattttcttcactgctgttatcgaccccgcaagcgagcttgggcagaaatggacacctctactcaaggtcttgtctgagctggagggtgtgcacttgaaagtcttcatgaaccctagggatcgtttggaagaacttccggtcaagaggttctatcgcttcgttatggattccgctccggtatttgacgaagcaggcaagctcgaggtgccttctgcttccttcaaagggttgccgtcagaagctctgctaaacctgggtatggacgtcccaccggcttggctggtggcccccaaggtctctgttcatgatctcgacaacattaagcttagctccgtaacatctgatgtcaccgcaatctatgagttggaaaacattttgattgagggacacgcaaggagcaccgattcggggactcctagaggtgtgcagcttgtacttggcacggagtctaacccacgagtcgcggacactataatcatggcaaacttgggatacctccagttcaaagcgaatcccggaatttacgacatcacccttgagaaaggccgcagctcagacatcttctatgtcgagagcattggcgcacatgggttctcgcctgttgctggcgatgagactactgaggtcgcacttttggacttcttgggtacgacactttacccacgacttcggcggaacccaggcaaagagaacttggacgtactggaagagagtggcgcggcaccatctggcaatgccggtggtgcaatggacttcgttaacaaggggctcaaattcgccgaaagccttctgggcggcgccaaaggcaaggccaaagaaaaatcgccttccgaactgcaacacgccgagatcaacattttctcggtcgcaagtgggcacttgtatgagcgcatgctgaacatcatgatggtcagcgtaatgcgccatacgaagcacacagtcaagttctggttcatcgagcagttcctctcaccgtccttcaaagactttattccgcacatggcagccgagtatgggttcaaatatgagatggttacgtacaagtggccacactggctccgacagcaaaaggagaagcagcgcgagatttggggctacaagatccttttcttggacgttcttttcccgctgacgttggacaaggtcatctttgtggatgccgatcagatcgtacgaactgatatgtatgaccttgtgcagctcgatctccaaggcgctccgtacggtttcacgcccatgtgtgactcgcgaaccgagatggagggcttcaggttctggaaacagggttattgggagcgctacttgaagggcctaccgtatcacatctcagccctgtacgtggttgatttgcggcggttccgtgaactggcggctggtgatcgtctgcgccaaacctaccacactctgtcagcggatccgaactccctttccaacctcgaccaggatctgccgaaccacatgcagttctcgattcccatcttcagccttccacaggagtggttgtggtgtgaaacttggtgcagcgatgacactcagcctatggcaaagaccattgatctctgcaataacccgatgaccaaggagccaaaactcgacagagcacggaggcaggtgccagagtggaatgtttacgacgccgagattgcggcagtcgaccgcaagcgcaagggcttaccagtatccggcgatgctgccagcgaacaggcagcaaagaaccccaaaagccggaccctggcggtggaaccggagaatacacacattgtggacgagctgtga

SEQ ID NO: 47 - protein, 1346 aa, Metarhizium acridum
MEPLKELQDCDIWVLLDDRQYCTPDFDAEAKNELVSAVVKPLPFDRILGIGRDAILYADPTSDGFAEYHQSLSKAARTMNLRYRLRYRRSKSHISRPLPVSGYGVELALKKTDYIVMDDRHSSQSTEQSPKEPVEVLDGTDDVADLKPLSTSELSSIGMKAASFIKDSDHPFDTLVKLTQDFPKFASSIASRNVSIAFAAENKQNRAKKMRGGINFLWMNGAQLTDREIQPFALVNMLRSERRLVDGIRDLGFDGEQAVALLSHKAVSAAKEDDKPFRYDWTDKLEGGRVILWLNDLEKDDRYASYPKSLSSLLQGTFPGQFPPIGRNIFNLVIPADLSNTEDLDFISEVESIRERGIPIRFGLVPLQLSDEAKTRAKVAYFLTENYGIESTISYISQLAKAHQKIADSKTLLSTITENHTLLPGGEDMSLSMILQASAFTKRLLQAEKWVKRLKADTVVRPLFVNGVLVPRDQSWMQSLSMTVSQDLQTVQRGIYHGVLDDDTWTVGVFLEGAASRRSLYISEANEKTLRVLNIAKIYRENADLFDAVPVFDSYAESTQENWAVVTVLADMSSRAGLDVILSALEFRRNNPAIRLDFVDTQDNAKMSSQVNKALKANEAKLKDIETVQDLEELLSEASNYDASDDFAVSVARFLADTKIPTSSQVVIMNGRVIGPIAPEASFDAEDFQQILAYEQTRRILPVYAAVADLGLNEKISDSMAAAKLSSIIALSTLSDLPEGIFESSSPIRSAIYASWNSSHTVIESGDPKKSSIHIVGLLDPVNETSQRWAYILRLLAELDGVYVKLFLNPKVQVEELPVKRFYRYVVEPTPKFDENGSVKALTATFSGLPLNALMTVGMDVPPAWLVAPKLSVHDLDNIQLSAANSDVEATYELQHILIEGHSRDDQGSAPRGAQLVLATESQPLLTDTIVMANLGFFQFKANPGVYNIQLKEGRSAEIFTIESIGAQGWEAAPDDEGSELALMDFQGTTLYPRLKRRPGMENQDVLEHTSNLSQGNIVSKGLKFAEGLLGGKGKSTSDVQHAEINIFSVASGHLYERMLNIMMVSVMRNTKHSVKFWFIEQFLSPSFKEFIPHLAKEYGFKYEMITYKWPHWLRQQKEKQREIWGYKILFLDVLFPLSLDKVIFVDADQVVRTDMMDLVNLDLNGAPYGFTPMCDSRTEMEGFRFWKQGYWANYLRGKPYHISALYVVDLRRFRELAAGDRLRQQYHALSADPASLSNLDQDLPNHMQFQIPIHSLPQDWLWCETWCSDESLAKARTIDLCNNPQTKEPKLDRARRQVPEWTIYDQEIAALDLKRKRRLQSDATETYRTTSEDGEVGDHRSKDEL

SEQ ID NO: 48 - DNA, 4041 bp, Metarhizium acridum
atggaacctcttaaggaattgcaggattgcgatatttgggttttactcgacgacaggcaatactgtacgcctgatttcgatgctgaagcgaagaacgagctggtttccgcggtcgtcaaaccgttgcctttcgatcgaatcttgggtatcggaagggatgctatcctgtatgccgatcctacctcagacggatttgcagagtatcaccagtcactgtcaaaggcagcacgcaccatgaacttacgttatcggcttcgatatcgccgcagcaagtctcatattagccgacctttaccagtcagcggctatggagtggaactcgcattaaagaagacagattacatagtgatggatgacagacattccagccaaagcacggagcaaagccccaaggaaccggtggaagttcttgatggaacagacgacgtggccgacttaaaacccctttccacttctgagctttcttccattggaatgaaagctgcgtcgtttatcaaggacagtgatcacccgttcgacaccctggtaaaactcacacaagacttcccaaaattcgcatcgtcgatagcctctcggaatgtttcaattgcgtttgctgctgaaaataagcagaatcgagcaaagaagatgcggggtggtatcaattttctatggatgaacggagcacagctcactgaccgagaaatccagccttttgcgcttgtaaacatgttacgaagcgaaaggaggcttgttgatgggattcgagatttggggttcgatggagaacaggctgttgcccttctgagccacaaagcagtgtcggctgctaaggaagacgataaaccttttcgttatgattggacagataagttggagggtgggcgtgtaattctatggctcaatgacttggaaaaggatgacagatatgcttcatacccgaagtctttgtcctcattgcttcaaggcaccttccctggccaatttccaccgattggtcgaaatatattcaacttggtcattcccgccgacttgtccaacactgaggatctagacttcatctccgaggtagaatctatcagggaacgtggtattccgattcgattcggactggtaccgctgcagctgtctgatgaagccaagactcgggcaaaggtcgcatattttcttacagaaaactatggtatcgaatctacgatatcgtacatttcacagctggctaaggcccaccagaaaattgctgattccaagactctactctcaacgattaccgagaaccatacacttttacctggaggcgaggacatgtcgttgtctatgatattgcaagcaagcgcctttactaagaggctcttacaagctgaaaaatgggtcaaaagattgaaggccgacacagtcgttcgtccattgtttgttaatggtgttttagtgcctcgtgaccaaagctggatgcaatcccttagcatgacagtctcacaggacctccaaactgtacaaaggggaatatatcacggcgtcttagatgatgatacctggactgttggagtgtttctcgagggggctgcctcacgacgcagcctttatatttcggaagccaatgagaaaaccttgcgagtgttgaatattgctaaaatttatcgcgagaatgcggacttatttgacgcagttccggttttcgattcttatgccgaatcaacacaagagaactgggcagttgttaccgtacttgcggatatgtcttcgagggctggtcttgatgtaattttgtcagccctagagtttagacgcaataacccggcaatccgtctggatttcgtcgacacgcaagacaacgccaagatgtcttctcaggtcaataaggctttgaaggcgaatgaagctaagttgaaagacatcgaaaccgtacaagacctggaagagctccttagtgaggcttcgaattatgatgccagcgatgactttgcggtatctgtagcaagattcctcgctgacactaagataccgaccagttcacaggtcgtgattatgaacggacgagtgatagggcccatagcaccagaagcgtctttcgacgccgaggatttccagcagatattggcatatgaacagacacgtcgcattctccccgtttatgctgcggttgcagacctaggcttgaatgaaaaaatttcagattctatggcggctgccaaactcagctccattattgcgctgtcaacgctttctgatctgcctgaaggaatctttgaatcctcttcaccgatccgttctgccatatatgcctcttggaattcgagccacacggtaatagaatcgggcgacccgaagaaatcaagcatacatattgtgggattattggatcctgtcaatgaaacaagccagagatgggcctatattctgagattgcttgcagagttagatggcgtttacgtcaaactcttcctaaatcccaaagttcaggttgaggagcttcctgtgaaacgattttaccgttatgtcgtcgaaccaacaccgaaattcgacgagaatgggagtgtcaaagccttaacagcaactttttcaggactcccattaaacgcgttgatgactgtggggatggacgttccgccagcctggttagtcgcaccaaagctgtccgtacacgacctcgataacattcaactaagcgctgcaaattcggatgttgaagcgacttacgaacttcaacatattctaattgaagggcattctcgcgacgatcagggatcagccccgcgaggtgctcagctagtcctggcaacagaaagccagccgcttctgacagatactattgtcatggcaaacctaggctttttccaattcaaggctaatcctggcgtctataatatccagcttaaagagggtcgaagtgccgagatctttactattgaaagcattggtgctcagggatgggaggcagcacctgatgacgaaggcagcgaacttgcgctgatggactttcaaggcaccacattatacccgcgactcaagcgccgtcccggcatggaaaaccaagacgttttagagcacacaagcaacctatcccagggcaacatagtttccaaaggcctaaaatttgcagaagggctccttggcgggaaaggaaaatccacttcagatgtacagcatgctgagataaacatattttccgttgcgagtgggcatctgtatgagcggatgctcaatatcatgatggtttctgtcatgcgcaatacgaaacacagtgtcaaattttggttcatagaacaatttctctcaccatcgttcaaagaatttataccgcacctggcaaaggagtacggttttaaatacgagatgatcacatacaagtggccacactggcttcggcagcaaaaagagaagcaaagggagatttggggatataaaatcctttttttggacgttctctttccgttatcgctagacaaggtcatatttgtggacgctgatcaagttgttcgcaccgacatgatggaccttgttaacttggatctaaatggtgcgccgtatggctttacaccgatgtgtgattctcgaacggagatggaggggttccgattctggaagcagggctactgggcgaactatcttcgtggaaagccatatcatatttcggctctttacgtcgtggatttacgccgtttccgtgagctggccgctggtgaccgactcagacaacagtaccatgctctctcggcggacccggctagtctgtcaaacttagaccaagacttgcctaaccatatgcaatttcaaatcccaatccatagcttaccgcaagactggctttggtgcgagacgtggtgcagtgatgagagcctcgcaaaagctcggaccattgacctatgcaataaccctcaaaccaaggaaccgaaacttgacagggcgaggagacaggtcccggagtggaccatatatgaccaagagattgctgctcttgacttgaagcggaaacgacgcctccagtcagacgcaacggaaacgtatagaacaacatcagaagacggagaagtgggggaccatcgctcaaaagatgaactgtag

SEQ ID NO: 49 - protein, 1347 aa, Metarhizium anisopliae
MEPLKELRDCDIWVLLDGRQYCTPDFDAEAKNEPVSAVVKPLAFDRTMGIGRDAILYADPTSDRFADYHQSLLKAARTMKLRYRLRYRRSKSHISRPLPVSGYGVELALKKTDYIVMDDRHSSQSTEESPKDPVEVLDGTDDVADLNPLSTSELSSIGMKAASFIKDSDHPFDTLVKLTQDFPKFASSIASRNVSIAFAAEIKQNQAKKMRGGINFLWMNGAQLTDREIQPFALVNMLRSERRLVDGIRDLGFDGEQAVALLSHKAVSAAKEDDKPFRYDWTDRLEAGRVILWLNDLEKDDRYASYPKSLSSLLQGTFPGQIPPIGRNIFNLVIPADLSNTEDLAFISEVESIRERGIPIRFGLVPLQLSDEAKTRAKIAYFLTENYGIESTISYLSQLAKAHQKIADSKTLLSTITENHTLLPGGEDMSLSMILQASDFTERLVKAEKWVKRLKADTVVRPLFVNGVLVPRDQSWMQSLSMTVSQDLQTVQRGIYHGVFDDDTWTVGVFLEGAASRRNLYISETNEKTLRVLNIAKVYRENADLFNAVPVFDFYAESTQENWAVVTVLADMSSRAGLDLILSALEFRRNNPAIRLDFVDTQDNAKISSQVNKALKANEAKLKDIETIQDLEQLLSEASSYDASDDFAVSVARFLADTKMPTSSQVVIMNGRVVGPIEPEASFDAEDFQQVLSYEQTRRILPVYAAVADLGLNEKVSDCMTAAKLSSIIALSTLSDLPEGIFESSSAIRSSIYTSWNSSHTVIESGDPKKSNIHIVGLLDPVSEKSQKWAHVLRLLAELDGVYVKLFLNPKVQVEELPVKRFYRYVVEPTPKFDENGSVKALAASFSGLPLNALMTVGMDVPPAWLVAPKLSIHDLDNIQLSAANSDIEATYELQHILIEGHSRDDEGSAPRGAQLVLATESQPLLTDTIVMANLGFFQFKANPGVYNIQLKEGRSAEIFTIESIGAQGWEAAPDDEGNELALMDFQGTTLYPRLKRRPGMENQDVLEDTSNPSQGNIVSKGLKFAEGLLSGGKGKSTSDVQHAEINIFSVASGHLYERMLNIMMVSVMRNTKHSVKFWFIEQFLSPSFKEFIPHLAKEYGFKYEMITYKWPHWLRQQKEKQREIWGYKILFLDVLFPLSLDKVIFVDADQVVRTDMMDLVDLDLNGAPYGFTPMCDSRTEMEGFRFWKQGYWSNYLRGRPYHISALYVVDLRRFRELAAGDRLRQQYHALSADPASLSNLDQDLPNHMQFQIPIHSLPQEWLWCETWCSDESLAKARTIDLCNNPQTKEPKLDRARRQVPEWTTYDQEIAALDLKRKQRLQPDAAETDRTTSEDRKVEDGRSKDEL

SEQ ID NO: 50 - DNA, 4044 bp, Metarhizium anisopliae
atggaaccccttaaggaattgcgggattgcgatatttgggttttactcgacggcaggcaatactgtacacctgatttcgatgccgaagcgaagaacgagccggtttccgcggtcgtcaaaccgctggctttcgatcgaaccatgggtatcggaagggatgctatcctgtatgccgatcctacctcagatagatttgcagattatcaccagtcactgttaaaggcagcacgtaccatgaagttacgttatcggcttcgatatcgccgcagcaagtctcatattagccggcctttaccagtcagcggctatggagtggaactcgcattaaagaagacagattacatagtgatggatgacagacattccagccaaagcacggaggaaagccccaaggacccggtcgaagttcttgatggaacagacgacgtggccgacttgaaccccctttccacttctgagctttcttccattggaatgaaagctgcgtcgtttatcaaggacagcgatcacccgttcgacaccctggtaaaactcacacaagacttcccaaaattcgcatcgtcgatagcctctcggaatgtttcaattgcgtttgctgctgaaatcaagcagaatcaagcaaagaagatgcgaggtggtatcaattttctatggatgaacggagcacagctcactgaccgagaaatccagccctttgcgcttgtaaacatgttacgaagcgaaaggaggcttgttgatgggattcgagacttggggttcgacggagaacaggcggttgcgcttctgagtcacaaagcagtgtcggctgctaaggaagacgacaaaccttttcgttatgattggacggataggttggaggcgggacgtgtaattttatggctcaatgacttggaaaaggatgacagatatgcttcatacccgaaatctttgtcctcactgcttcagggcaccttccctggccaaatcccaccgattggtcgaaacatatttaacttggtcattcccgccgacttgtccaacaccgaggatctagcattcatctccgaggtagaatctatcagggaacgaggtattccgattcgattcggtctggtgccgctgcagctgtctgatgaagccaagactcgggcaaagatcgcatattttcttacagaaaactatggtatcgaatctacgatatcatacctttcacagttggctaaggcccaccagaaaattgctgattccaagactctactctcaacgattaccgagaaccatacacttttacctggaggcgaggacatgtcgttgtctatgatattgcaagcaagcgactttactgagaggctcgtaaaagctgaaaaatgggtcaaaagattgaaggccgacacagtcgttcgtccattgtttgttaatggggttttagtgcctcgtgaccaaagctggatgcaatcccttagtatgacagtctcgcaagacctccaaactgtacaaaggggaatataccacggtgtctttgatgatgatacctggactgttggagtgtttctcgagggggctgcctcacgacgcaacctttatatttcggaaaccaatgagaaaaccttgcgagtgttaaatattgccaaagtttaccgcgagaatgcggacttatttaacgcagttccggttttcgatttttatgccgaatcaacacaagagaactgggcagttgttaccgtacttgcggatatgtcttcgagagccggtcttgatttaattttgtcagccctggagtttagacgcaataacccagcgattcgtctggatttcgtcgacacgcaagacaacgccaagatctcttctcaggtcaataaggctttgaaggcgaatgaagctaagttgaaggacatcgaaaccatacaagacctggaacaactccttagtgaggcttcgagttatgatgccagcgatgactttgcggtatctgtagcaagattcctcgctgacactaagatgccgaccagctcacaagtcgtgattatgaacggacgagtggtagggccgatagaaccagaagcgtctttcgatgccgaggatttccagcaggtactgtcatatgagcagacgcgtcgcattctccccgtttatgctgcggttgcagacctgggcttgaacgaaaaggtttcagattgtatgacggctgccaaactcagctccattattgcgctgtcaacactttctgatttgcctgaaggaatctttgaatcttcttcagcaatccgttcttccatatatacttcttggaattcaagccacacagtaatagaatcgggcgacccgaagaaatccaacatacatattgtgggattattggatcctgtcagcgaaaaaagccagaaatgggcccatgttctgagattgcttgcggagctagatggtgtttacgtcaaactcttcctaaatcccaaagtacaggttgaagaacttcctgtgaaacgattttaccgttatgtcgtcgaaccaacaccgaaattcgacgagaacggcagtgtcaaagccctggcagcaagtttttcaggacttccattgaacgcgttgatgactgtgggcatggacgttccgccagcctggttagtcgcaccaaagctgtccatacacgacctcgataacatccaactaagcgctgcaaattcggatattgaagcgacctacgaacttcaacacattctgattgaagggcattctcgcgatgatgagggatcagccccgcgaggtgctcaactagtcctggcaacggaaagccagccgcttctgacagataccattgtcatggcaaacctgggctttttccaattcaaggccaatcctggcgtatataatatccagctaaaagagggtcgaagtgccgagatctttaccatcgaaagcattggtgctcagggatgggaagcagcacctgatgacgagggcaacgaacttgcgctgatggactttcaaggcactacattatacccgcgactcaaacgccgtcccggcatggaaaatcaagacgttttagaggacaccagcaatccatctcagggcaacatagtttctaaaggcctaaaatttgcagaagggctgcttagtggtggcaaaggaaaatccacttcggatgtacagcatgctgagataaacatattttccgttgcgagtgggcatctgtatgagcggatgctcaatatcatgatggtttctgtcatgcgcaatacgaaacacagcgtcaaattttggttcatagaacaatttctctcaccatcgttcaaagaattcataccacacctggcaaaggaatacggtttcaaatatgagatgatcacatacaagtggccacactggcttcggcagcaaaaggagaaacaaagggagatttggggatataaaatcctttttttggacgtcctctttccgttatcgctggacaaggtcatatttgtggacgctgatcaagttgttcgcaccgacatgatggaccttgttgacttggatctaaatggtgcgccgtatggctttacaccgatgtgtgattctcgaacggagatggaggggttccgattctggaagcaaggctactggtcgaactatcttcgtggaaggccatatcatatttcggctctttatgtcgtggatttacgtcgtttccgcgagctggccgccggtgaccgactcagacaacaataccatgctctctcggcggatccggctagtctgtcaaacttagaccaagacttgcctaaccatatgcaatttcaaatcccaatccatagcttaccgcaagagtggctttggtgcgagacgtggtgcagtgatgaaagcctcgcaaaggctcggaccattgatctatgcaataaccctcaaaccaaggaaccgaaacttgacagggcgagaagacaggtcccggaatggaccacatatgaccaagagattgctgctcttgacttgaagcgtaaacaacgcctccagccggacgcagcggaaacggatagaacaacatcagaagatagaaaagtggaggacggtcgctcaaaggatgaactgtag

SEQ ID NO: 51 - protein, 1500 aa, Neurospora crassa
MIRLSQLPWGLAAAIVTATWLPSHHVAASPSVDVALKAAFPSPPYLVELLETAASENATAYFPLLDRIAKGDFAQAKSDKELYEKFLQVLQEDGHVNAEALSTFKLALSLRSAAPRVEAHYQYYTTAVEPYVVADEDGCDLWFLFNGKQYCKASLQASSDHVNSNSRERTLPFDRQFGSGHQEIVLYADITSPAFGKYHEAAMELARKGEASYRLRYKRSLGQSDDALAVNGYGVELTLKRTDYIVIDDRDTGGDKATGDDSQKTIRSDSELVLDEDEEVADIKPLEKSELSPLAVKAASFVMQNESPFDTLLKLTQDFPKYSTKLGKHNVSKEFLAEHEYNRQLLVPPGANVLWMNGVQMVDRQVQPFGLVDMLRRERKLINGALDLGLTGQQAVSLLGHDEVAAAKATEEEPRRFDWRDEPEGGQVIIWLNNIEKDKRYAEYSPSVWALIQHFGQGLPQVRKNLFNLVVPVDFSRAEDVTLVTRQLLAFMKRGIPVRFGLVPLTPTGEAVEQAKVLYHLLNTYGLAAMSTYLEKSLEASSTDKPNEDIFSLATKDREIRPDHEALPFKHISASEELEKQVHRAKHWCERLRADTDIPPAFINGFAIPREEDWLRNMNHKLMVDLQMLQQAVYYNKVNDHTNVPAFFLENAIARRNTFIYPEDANAVKVLNVNKVYSEHQRLFSKVPVVEADDTAPKEDWAVLTVVTDLNSVEGQKLLYFALRFRQEHQGVRLDIVHNPADLANSPSIMNQRVKAKESSLLEVTRLVDLETILEEGKPEADPDFDADLASFLSGFNLKSGDNMLILNGRIVGPIASANDFLKEDFAEFLRTERMNRILPVYKAIEDLGLTDKVSGPLAAAKLTSVTALSGISDTPQGIFDSAPPIRTTAYNRLNTTYTSFHVGNPETATIFFVAVINPASEMGQKWAPILKVLSELEGVHLQVFVNPQTELSELPVKRFYRYVLESAPSFDESGKVKALSATFNGVPPETLLVAGMDVPPAWLVASKVSVDDLDNLRLKDIKAKRNTEHVEAIYELENILIEGHSREFPSGSPPRGVQLVLATEKHPHFADTIIMANLGYFQFKANPGMYSIHLMEGRSSDIFTLDSVGAQGWSPVPGDETTEVALLSFQGATLYPRLTRKPGMEREDVLQDETTPQDESLVSKGLKFAEGLFGSKKPTEKSVSETEHAEINIFSVASGHLYERMLSIMILSVMEHTDHSVKFWFIEQFLSPSFKSFLPHLAAEYGFKYEMVAYKWPHWLRHQSEKQREIWGYKILFLDVLFPLSLDKVIFVDADQVVRTDMYDLVSLDLEGAPYGFTPMCDSRTEMEGFRFWKTGYWANYLRGQPYHISALYVVDLRRFRELAAGDRLRQQYHTLSADPNSLANLDQDLPNHMQFQIPIKSLPQEWLWCETWCSDETLTKARTIDLCNNPMTKEPKLERARRQVPEWTVYDEEVAALAKRVREQEEKKAGEVLEGKKVEEQVIVEEKHEEKEHVIDEL

SEQ ID NO: 52 - DNA, 4503 bp, Neurospora crassa
atgatccgtctctcccagctgccgtggggtctagcggcagccattgtcacggcgacatggcttccctcgcaccacgttgcagcttctccctctgtagacgtcgcactcaaggccgcgtttccttcgcctccgtatctggtagagctcctcgaaaccgcggcttccgaaaatgctactgcctacttcccactgctggaccgcattgccaagggagactttgcccaggccaagtccgacaaagagctctatgaaaagttcctccaggttcttcaagaagatgggcatgtgaatgctgaggcgctgtcgaccttcaagctggctctttcgttgcggtccgctgcgccccgtgtcgaggctcattatcagtactataccactgctgttgagccatatgtagtggccgatgaggacggatgtgatctgtggttcctattcaacgggaagcaatactgcaaagccagcctccaagcttcatcggaccatgtcaacagcaactcccgagagcgtaccttgccttttgacagacaattcggtagtggccatcaggaaatcgtgctctatgccgacatcacctcccctgcctttgggaaatatcacgaggccgccatggaacttgctcggaaaggagaggcttcgtatcggctgcgttacaagagaagccttggacaatcagatgatgcgctcgcggtcaacggttatggcgttgagcttacgctgaaaaggacagactacatcgtcattgatgacagggatactggtggtgacaaggccaccggagatgactcccaaaagaccattagatcggattccgagcttgtcctggacgaagatgaagaggtcgcagacatcaaaccccttgaaaagtccgagctttcgccccttgctgtcaaggcggcatccttcgttatgcagaacgaatccccgttcgataccctgcttaaacttacccaggacttccccaagtactcgaccaagcttggaaagcacaacgtgtccaaggagtttttggccgaacatgagtacaacaggcaactgctggtgccaccaggtgccaacgttctgtggatgaacggtgttcagatggtagacagacaggtccagccctttgggcttgtagacatgcttcgccgggaacgcaaactcattaacggtgccctggacttgggcctgactggccagcaagccgtttcccttttgggtcatgacgaggttgccgcggcaaaggccaccgaggaagagcctcgtaggttcgactggcgggatgagcccgagggtggtcaggtcattatctggctgaacaacattgaaaaggacaaacggtacgccgagtattctccgtcggtctgggccttgattcagcactttggacaaggattgcctcaagttcgcaagaaccttttcaaccttgttgttcctgtagacttctccagggccgaggatgtcacgctagtcaccagacagctccttgctttcatgaagcgaggcattcctgtccggtttggccttgtccccctaactcccacaggcgaggccgtagaacaggcaaaggtcctgtaccatcttctcaacacgtatgggttggctgccatgtctacctacctggaaaagtctcttgaagcctccagcaccgataagcccaacgaggatatcttcagtctggccaccaaggaccgtgagattcgaccagaccatgaggcgctacctttcaagcatatttctgcctccgaggagttggaaaagcaggtccaccgcgcgaagcactggtgtgaacgcctcagggctgataccgacattcctcctgccttcataaacggcttcgccatcccacgtgaagaagactggctacggaatatgaaccataagcttatggtggacctccagatgttgcaacaggcggtttattataacaaggtcaatgatcacaccaatgtcccggccttcttcctggagaacgccattgcccggcgcaataccttcatataccccgaagatgccaacgccgtcaaggtcctgaatgtcaacaaggtgtatagcgagcaccaacgtctgttcagcaaagtgcctgtggttgaagcggatgacactgcccccaaggaagactgggcagtacttacagttgttacagacctcaatagcgttgagggccagaaactcctttactttgcgctgcgtttccgacaggaacatcaaggagttcgcctcgatatcgttcataaccccgctgacctggccaactcgccttctatcatgaaccagcgcgtaaaggccaaggagagcagcctgctggaggttacccgccttgttgaccttgagactatcctcgaggagggtaagcctgaggcggatccggattttgatgccgaccttgctagcttcctctctggctttaacttgaagtctggagacaatatgctcatcctcaatggccgcattgttggtcctattgcgtcggcaaatgacttcctaaaggaggattttgctgagttcctccgaacagaacgtatgaaccgcatccttccggtttacaaggcaatcgaggatctcggactgactgataaggtctctggacccctggctgctgccaagctgacctcggtcactgctctctcgggcatttcagatactcctcagggtatctttgactctgccccgcccatcagaacaacggcttataacagattaaacaccacgtatacctccttccatgtcggtaaccccgagaccgccacgatcttctttgttgcggtcatcaaccctgccagtgagatgggccagaagtgggctcccatcctcaaggtcctttccgaacttgagggtgttcatctgcaagtatttgtcaatccacagactgaactatcggagctccccgtcaagaggttctaccgttacgtcctggaatctgctcccagcttcgatgaaagcggcaaggtaaaagccttgtcggcgaccttcaacggagtgccaccagagactctcctcgttgccggcatggatgtcccgcctgcttggctcgtcgcctccaaagtctccgtcgacgatctcgacaaccttcgtctcaaggacatcaaagccaagagaaacacagagcacgtagaagccatctacgaactggaaaacattctgatcgagggtcactcccgggaattcccgtccggctcacctccgcgcggcgtgcagctcgtcttagcaaccgagaaacacccccacttcgccgacaccatcatcatggccaatctcggctacttccaattcaaggccaacccaggcatgtacagcatccacctcatggagggccgtagctccgacatcttcacgctcgacagcgtcggcgcccaaggctggtcccccgtccccggcgacgaaaccaccgaggtcgccttgctgtctttccagggcgccacgctctacccccgcctgacccgcaagccaggcatggagcgcgaagacgttcttcaggacgagaccacaccccaagacgaatcgctcgtctccaagggtctcaaattcgccgagggcctctttggaagcaagaagcccaccgaaaagtccgtatccgagaccgaacacgcagaaatcaacatcttctccgtcgcctccggccatctgtacgagcgcatgctctccatcatgatcctttccgtcatggagcacacagaccactcggtaaaattctggttcatcgagcagtttctctccccctcattcaaatccttcctcccccacctggccgccgaatacgggttcaaatacgagatggtcgcctacaaatggccgcactggctacggcaccaatcggaaaagcagcgcgaaatctggggctacaagattttgtttttggacgtcctcttccccttgagcttggacaaggtcattttcgtggacgcggaccaggtcgtccgtacggacatgtacgacctcgtcagcctcgacctggagggggcgccctacgggttcacgcccatgtgcgactcgcgaaccgaaatggaaggcttccgcttctggaagacgggttactgggccaactacctgcggggccagccgtaccacatctcggcgctgtacgtggttgatctgcgccgcttcagggagctggccgctggcgatcggttgaggcagcagtatcatacgctgagcgcggacccgaatagtctggcgaatctggaccaggatctgccgaatcatatgcagttccagatcccgatcaagagtctgccgcaggagtggttgtggtgcgagacgtggtgttctgatgagacgctgacgaaggcgaggacgattgatttgtgtaataatccaatgacgaaggagcccaagttggagagggcgaggaggcaggtgcctgagtggacggtttatgacgaggaggttgcggcgttggctaagagggtcagggagcaggaagaaaagaaggctggggaagttttggaggggaagaaggttgaggagcaagtgattgtggaggagaaacatgaggagaaggagcatgtcattgatgagttgtag

SEQ ID NO: 53 - protein, 1508 aa, Pyrenophora teres
MRASASLLSAKALLALSAFTHIAAYASPSINVALRAAFSPAPYLVELLETAAEENATAYYPILDRVAEGYFDDKSTDQDLYTAFVHLLQTDGHITAPEALASFQFALSVRSAAPRIEAHHQFYKTSAEPSLVAEQTDACEIWVSFHGKQYCSVHLDEPFGNIQSERTYQLPFDRILGNSSALPAILYADITSPRFKKWHKTLSSTAKEGKTSYRVRHKPSTKASTSPLIVNGYGVELQLKRTDYIVIDDRQAVQGESAAQKPMGTELNDDDEVADLRPLSKEEVSNLGIKAASFVAQSEQPMDTLMKLVQDFPKYSSIIAAQDASEDFVEEHLKNREQLLPAGFSVIWINGVQIPARDVNPYSLLAHLRRERKLITGIQKQGLTGSEVISLLSHPAIAETQTEDEPQRYDFRDASEGGNVIVWLNDIEKDSRYESWPADLRALLQRTFPGQLPSCRRDIHNAIVSVDLTSADDVTNLLDVILSLIKRGIPMRWGIVPQTTETGAPEQAKIIYYLHEAYGIDAVTVYLQKSLDDKKLAHPDKAIFAATVKSAQILDEQEALEFDDVIKSESLDQRVTGAKQYLKRLSAEGPKAPIFVNGVPIPANEEWLSTISQRVGMDLRLVQKGVFEGVFNDDSWVPQLFLFQAANKRNPILIPENEKNITVLNMADFQEIHGGAFSKMPRIRASESASKSDWVHITLVADFDSVSGSALLKSLATFREANPNIEAVLIHNPQTGAEQSNASEDLLEAYTKSGQQLTSEALMEVMAQDANPRAVPAESTAFWKTAEPIYDAFGLKPGQHGLLVNGRYIGPIPDDYAFSNDDMETLVTYETNKRIEPLNKALQGLELLDKIASPFDIAKIQSLVALSTVSDVPEGMFETASTLRISAYSNWTAEHTAILKGDQDKAIFHIVASVDPATELAQKWVPILKTLSDMDGVHLKLFLNPGQMLQELPVKRFYRYVLEARPHFKPDGSVGSLEAHFSGIPKEALLNLGMDVPPSWLVAPQESIHDLDNIKLSTIPAGTNIDAIYGLESILIEGHSRDTTNGGQAPRGAEVVLSTEKDPHFADTIIMANLGYFQFKANPGFYNIQLKSGRSQDIFNLDSAGTIGWAPQPGDETTEIALMSFQGATIFPRLSRKPGQETADVLAPEESLASELVGKSAQKVNSFFGKMGLNINSEKVFQKGADLFAGGKAVKKGTQADINIFSVASGHLYERMLNIMMVSVMKHTNHTVKFWFIEQFLSPSFKSFLPHIAAEYGFEYEMVTYKWPHWLRGQTEKQREIWGYKILFLDVLFPLDLEKVIFVDADQIVRTDMYELVQHDLQGAPYGFTPMGDSRTEMEGFRFWKTGYWANFLRGRPYHISALYVVDLVRFRQLAAGDRLRQQYHSLSADPNSLSNLDQDLPNNMQFNLPIHSLPQEWLWCETWCSDEDLAKAKTIDLCNNPQTKEPKLDRARRQVPEWNVYDEEIAALARRVKGEKQAAEVVDVQEQEQLREKKEKDAENKVEHNEL

SEQ ID NO: 54 - DNA, 4527 bp, Pyrenophora teres
atgagggcttcagcctcactactgagtgcgaaggctctcctggcgctgagcgccttcacacacattgcagcttatgcgagtccaagcatcaacgtcgctttacgcgcagcctttagccccgcaccatacctggtagagctactggaaaccgctgcagaagagaacgcgaccgcctactacccaatcctcgaccgcgtagctgaaggctactttgacgacaagtctaccgatcaagacttatacactgcctttgtacatctactacaaaccgatggacacatcactgcacccgaagctctcgcttccttccaattcgccctatcagtccgatcggctgcgccgcggatagaagcacaccaccagttctacaagacgtcggcggaaccttctcttgtcgctgaacagaccgacgcatgcgaaatatgggtatcgtttcatggcaaacaatattgctcggtacatctggacgagccgttcggcaacattcaaagcgaacgtacataccaattacccttcgaccgcatacttggcaacagctcggctttacctgccattctctacgccgacatcacttcacccaggttcaagaaatggcacaagacattgagcagcacagcaaaggaggggaagacatcctaccgcgtccgacacaagccttcaaccaaggcctcaacttcgccgttgattgtaaacggatatggtgtcgagctacaactgaagcggaccgactacattgtcattgatgatcgacaagccgtgcaaggagagagtgctgctcagaagccgatgggtacagagctgaacgacgatgacgaggttgctgacctcaggccattgtccaaagaggaggtgtcgaatcttggcatcaaagctgctagtttcgtggcacagagtgaacagccaatggatactctcatgaagctggtacaggacttccccaagtattcatccatcatcgccgcccaagacgcctctgaagacttcgtcgaggaacacttgaagaatcgcgaacagcttctccctgccggattcagcgtcatatggatcaacggtgtacagatcccagctcgcgatgtcaacccatactctctgctagcgcatctgcgacgcgagcgaaaattgatcactggtattcagaagcagggtcttactggatctgaggtcatttccctactgtcacatccagccatcgcagagacgcaaacagaagatgaaccacagcgctatgactttagggatgcatctgaaggtggcaatgttattgtatggttgaacgatatcgaaaaggacagcagatacgagagctggcctgctgatcttcgggctttgctccagagaactttccctggccagttgccgtcttgtcgtcgagatatacacaacgcgatcgtctccgtcgacctaacttccgcagatgatgtgactaatcttctcgatgtcatccttagtctcattaagcgcggcatcccgatgcgctggggtattgtacctcaaactactgaaacaggcgctccagagcaagcaaagataatctactacttacacgaagcatatggcattgatgccgtgactgtatatctccaaaagtccttagatgacaagaagctggcacatccagacaaagccattttcgcagcgactgtcaagagtgcccagattcttgacgagcaggaagcgctcgaatttgacgatgtgatcaagtcagaaagcctcgatcagcgtgtgaccggtgccaaacagtacttgaagcgtctctcagcagaaggccctaaagctccaatcttcgtaaacggtgttcccattcccgctaatgaagagtggctatctaccattagtcaaagagttggcatggaccttcgtctggtgcagaagggagtctttgagggggtcttcaatgatgacagctgggtgccgcaattgttcctcttccaggctgccaacaagcgcaaccctattctcatcccagagaacgagaagaacattacagtcctcaacatggccgatttccaagagatccacggaggggcttttagcaagatgccgcgaatccgcgcatcagaatctgccagcaagagtgattgggtgcacattacattggtcgcagactttgactcggtatctggatccgctcttctaaaatccttggcgaccttccgtgaagccaacccaaacattgaggcagttttgatacacaatccccagactggcgcagagcagtccaacgcgtcagaagacctcttagaggcttacaccaagtcaggccagcaacttacaagtgaagctttgatggaagttatggcccaggatgccaatcccagagctgtgccagccgaatcgacagcattctggaagacggctgagccaatttacgacgcttttggtctgaagccaggacagcatggtcttctagtcaacggacgttatatcggccccattccagatgactacgctttttccaatgacgacatggagaccttggtgacttatgagacaaataagcgtatcgagcctctgaacaaggcactccagggcctcgagcttttggacaagatcgcctcgcctttcgatattgccaaaattcagtccctagtggctctctcaacggtatcggatgtgccggagggtatgtttgaaaccgcatcgacgctgaggatcagcgcgtacagcaactggactgcagagcacaccgctattctcaagggagatcaagacaaagctattttccatatcgtagcttctgtagatccggctaccgaactagcgcagaaatgggtccctattttgaagacattgagcgacatggatggcgtgcatctgaagctcttcttgaatcctggacagatgctccaggaactcccggtaaaacgattctaccgctatgtcctcgaggctcgacctcacttcaagcctgacgggtctgtcggcagtttagaggcgcacttctctggtattccgaaagaggcattgttgaacctcggtatggatgtccctccgtcgtggctagtggcaccgcaagagtctattcacgatctggacaacatcaaactcagcacaattccagcaggaaccaacattgatgcaatttatggactggagagtatcctcattgaaggccactctcgcgacacaactaatggcggtcaagcaccccgtggagctgaagtcgttctttctacagagaaagatccacatttcgcggacacgatcatcatggccaatctgggatacttccagttcaaagccaatcctggtttctacaacattcaactaaagagcggtcgctcgcaggacatctttaacttagatagtgctggtacgattggctgggcacctcagccaggtgatgagactactgagatcgccctcatgagcttccaaggagctacaatcttcccccggctatctcgcaagcctggccaggaaacagccgatgtacttgctccagaggagtcgcttgcttctgaactcgttggcaaaagtgcacagaaagtcaacagctttttcggcaagatgggactaaacatcaactccgagaaggtcttccagaaaggcgcagatttgttcgctggaggcaaagcagtgaagaagggcacccaagccgacatcaacatcttctccgtcgcttccggtcacttgtacgagcgcatgttgaatatcatgatggtctccgtcatgaagcacaccaaccacacagtcaagttctggttcatcgagcaattcctttcaccgagcttcaagtccttcctcccacacattgctgctgaatacggattcgagtacgagatggtaacgtataaatggccacattggcttcgtgggcaaaccgagaagcagcgtgagatctggggatacaagatcctcttcctggatgtattgttccccttggatctcgagaaggtcatcttcgtcgacgcggatcagattgtcaggacagacatgtacgagcttgtgcagcacgatttgcagggtgcgccgtatggcttcacgcctatgggcgactcacgcaccgagatggaaggtttccgtttctggaagaccggctactgggctaacttcttacgtggccgtccataccacatctctgcgctctacgttgttgatctcgttcgtttccgtcaactcgcagctggagaccgactacgccagcaataccactccctctccgccgatcccaactccctttccaatttggaccaggatctgcccaacaacatgcaattcaatctcccaatccacagtctaccccaggaatggctgtggtgcgaaacctggtgcagcgacgaggatctagcaaaggcaaagaccatcgatctgtgcaacaacccacaaaccaaggaaccgaagctggatcgtgccaggcgacaggttcccgagtggaacgtgtacgatgaggagattgcagcgttggcaagacgcgtcaagggcgagaagcaggctgcagaggtggtggatgtacaggaacaggaacagctgagagagaagaaggagaaggatgctgagaacaaagtagaacacaatgagttgtaa

SEQ ID NO: 55 - protein, 1508 aa, Pyrenophora tritici-repentis
MRASASLLSAKLLLALSAFRHIGAYASPSINVALRAAFSPAPYLVELLETAAEENATAYYPILDRVAEGYFDDKSTDQELYTAFVDLLRIDGHITAPEALASFQFALSVRSAAPRIEAHHQYYKTSAEPSLVAEQTDACGIWVSFHGKQYCSVQLDEPFGNIHSERTYQLPFDRILGNSSALPAILYADITSPGFKKWHKTLSSTAREGKTSYRVRHKPSAKASTSPLIVNGYGVELQLKRTDYIVIDDRQAVEGESAAQKPMGTELNDDEEVADLRPLSKEEVSNLGLKAASFVAQSEQPMDTLMKLIQDFPKYSSIIAAQDASEEFIEEHLKNREQLLSAGLSVIWINGVQIPAREVNPYSLLAHLRRERKLVTGIQKQGLTGSEVISLLSHPAIAETQTEDEPQRYDFRDTSEGGNVILWLNDIEKDTRYETWPADLRALLQRTFPGQLPSCRRDIHNAIFSIDLTFADEVSDLLNVVLSLIKRGIPMRWGIVPRTTGKGALEQAKIIYHLLEAYGVDAVTVYLEKSLQDKKLARPDKAIFAAIVKSAPILDEQQPLDFDDVIKSESLDQRVAGAKQYLKRLSAEGPKAPIFVNGVPIPLGDEWLSAVSQRVGMDLRLVQKGVFEGVLNDDSWVPQLFLFQAANKRNPVIIPENEKNITVLNMADFQEIHGEAFNKMPRVRASDSASKSDWVHITLVADFDSVPGSALLKSLANFREANPNVEAVLIHNPQTGAEQSNTSEDLLEAYTKSGQELTSEALMELLARDANPRAVPADSTAFWKTAEPIYDAFGLKPGQHGLLVNGRYVGPIADDYAFSNDDMETLVTYETNKRIEPLNKALQGLELLDKIASPFDIAKVQSLVALSTVSDVPEGMFETASTLRISTYNSWAAEHTAIVKGDQDKAIFHIVASVDPATELAQKWVPILKTLSDMDGVHLKLFLNPGQMLQELPVKRFYRYVLEARPHFNSDGSVGSLAAHFSGIPKEALLNLGMDVPPSWLVAPQESIHDLDNIKLSTIPAGTNIDAIYGLESILIEGHSRDTTLGGQAPRGAEVVLSTEKDPHFADTIIMANLGYFQFKANPGFYNIQLKSGPSQDIFNLDSAGTSGWAPQPGDETTEIALMSFQGATIFPRLSRKPGQEKADVLDPGESLASELIGKGAQKVNSFFGKMGLNINSEKVFQKGADLLAGGKAVKKGTQADINIFSVASGHLYERMLNIMMVSVMKHTNHTVKFWFIEQFLSPSFKSFLPHIAAEYGFEYEMVTYKWPHWLRGQTEKQREIWGYKILFLDVLFPLDLKKVIFVDADQIVRTDMYELVQHDLQGAPYGFTPMGDSRTEMEGFRFWKTGYWANFLRGRPYHISALYVVDLVRFRQLAAGDRLRQQYHSLSADPNSLSNLDQDLPNNMQFNLPIHSLPQEWLWCETWCSDEDLAKAKTIDLCNNPQTKEPKLDRARRQVPEWNVYDEEIAALARRVKGEKKAAEVVDVQEQEQLREKKEKDAEKKVEHNEL

SEQ ID NO: 56 - DNA, 4527 bp, Pyrenophora tritici-repentis
atgagggcttcagcctcactactgagtgcgaagcttctcctggcgctgagcgccttcaggcacattggagcttatgcgagtccaagcatcaacgtcgctttacgcgcagcctttagccccgcaccatacctagtagagctgctggaaaccgctgcagaagagaacgcgaccgcctactacccaatcctcgaccgcgtagctgaaggctactttgacgacaagtctaccgatcaagagctatacacggcctttgtagacctactacgaattgatggacacattactgcacctgaagccctagcttccttccaatttgccctatcagtccgatcggctgcgccgcggatagaagcacaccaccagtactacaagacgtcggccgaaccttctcttgtcgctgaacagaccgacgcatgcggtatatgggtatcgtttcatggcaagcaatactgctcggtacagctggatgagccgtttggtaacattcatagcgaacgtacataccaattacccttcgaccgcatacttggtaacagctcggctttgcctgctatcctctacgccgatatcacttcacccgggttcaagaaatggcacaagacgttgagcagcacagccagggaggggaagacatcctaccgcgtccgacacaagccttcagccaaggcctcaacttcgccgttgatcgtgaatggctatggcgtcgagctacagctgaagcggaccgactacattgtcattgacgaccgacaagccgtggagggggagagtgctgctcagaagccgatgggtacagagttgaacgacgatgaggaggttgcggacctcaggccattgtccaaagaggaggtatcgaatcttggcctcaaagctgctagtttcgtggcccagagtgaacagcccatggacactcttatgaagttgatacaagactttcccaagtattcatccatcatcgctgctcaagacgcctctgaagagttcattgaggaacacttgaagaatcgcgagcaacttctctctgcgggcctcagcgtcatatggatcaacggtgtacagatcccagctcgcgaagtcaacccgtactctttgctagcgcatctgcgacgtgagcgaaaattagtcactggtatccagaaacaaggtcttactggatctgaggtcatttccctgttgtcgcacccagccatcgcagagacgcaaacagaagatgagccacagcgctatgactttagggacacatctgaaggcggcaatgtcattctctggttgaacgatatcgaaaaagacactagatacgagacctggcctgctgatctccgggccttgctccagagaactttccctggccaattgccgtcttgtcgtcgagacatacacaatgccatcttctccatcgacctaacttttgcagatgaagtgagtgatctgctgaatgtcgtccttagtctcattaagcgcggcatcccgatgcgctggggtattgtacctcgaactactgggaaaggcgcgctagagcaagccaagataatctaccacttactcgaggcatatggcgtcgatgccgtaactgtgtatctcgaaaagtccttacaggataagaagctggcacgtccagacaaagccatatttgccgcgattgtcaaaagtgccccgatccttgacgagcagcaacctctcgattttgacgatgtgatcaagtcagaaagcctcgatcagcgcgttgccggtgcgaaacagtacttgaagcgtctctcagcagaaggccctaaagctccaatcttcgtaaacggtgttcccattccacttggtgatgagtggctatctgccgttagtcaaagagttggcatggaccttcgtctggtgcaaaagggagtctttgagggggtcctcaacgatgacagctgggtgccgcaattgttcctcttccaggctgccaacaagcgcaaccctgttatcatcccagagaacgagaagaacatcacagtcctcaacatggctgatttccaagaaatccatggagaggcttttaacaagatgcctcgagtccgtgcatcagattctgccagcaagagtgactgggtgcacattacgttggtcgcagacttcgactcggtgcctggatccgctcttcttaaatcattggcgaacttccgtgaagccaacccaaatgttgaggcggttttgatacacaatccccagactggcgcggagcagtccaacacgtcagaagacctattagaggcttacaccaagtcaggccaggaacttacaagtgaagctttgatggagctcctggcccgggatgccaatcccagagctgtgcccgccgactccacagcattctggaagacggctgagccaatctacgatgcttttggtctcaaaccaggacagcacggtcttctagtcaacggacgttatgttggccctattgcagatgactacgcgttttccaatgacgatatggagaccttggtgacttatgaaacaaacaaacgcatcgagcctctgaataaggcactccagggccttgagctcttggacaagattgcctcgcctttcgatattgccaaagttcagtcgctagtagcactctcaacggtatcggatgtgccagaaggtatgtttgaaaccgcatcgacactgagaatcagcacatacaacagctgggccgcagagcacaccgctatcgtcaagggagaccaagataaagctatcttccatatcgtagcttctgtagatccggctaccgagctggcgcagaaatgggtcccgattttgaagacattgagcgacatggatggtgtgcatctaaagctcttcttgaaccctggacaaatgctccaggaactccctgtaaagcgattctaccgctatgtcctcgaggcccgaccccacttcaactctgacgggtctgtcggcagtttggcggcgcacttctctggtattccgaaagaagctttgttgaacctcggtatggatgtccctccgtcgtggctagtcgcaccgcaagagtctattcacgacctggataacatcaaactcagcacaattccggcgggaaccaacatcgatgccatttatggactggagagtatcctcattgaaggacactctcgcgacacaactcttggcggtcaagcacctcgtggagctgaagtcgtcctctctaccgagaaagatccacactttgcagacacgatcatcatggccaatttgggatacttccagttcaaggccaatcccggcttctacaacattcaactgaagagcggtccctcgcaggacatcttcaacttggatagtgctggtacgagtggctgggcacctcagccaggtgatgagactactgagatcgctctcatgagctttcaaggagctacaatcttccctcggttatctcgtaagcctggccaggaaaaggccgatgtacttgatccaggggagtcgcttgcgtctgaacttattggcaaaggcgcacagaaggtcaacagctttttcggcaagatgggattaaacatcaactccgagaaggtcttccagaaaggcgcagacttgttagcggggggcaaagcagtgaagaaaggtacccaagccgacatcaacatcttctccgtcgcttctggtcacttgtatgagcgcatgttgaacatcatgatggtctccgtcatgaagcacaccaaccacacagtcaagttctggttcatcgagcaattcctttcaccgagcttcaagtctttcctcccacatatcgctgctgagtacggattcgagtacgaaatggtcacatacaagtggccacattggcttcggggacagactgaaaaacagcgtgagatctggggttacaagatcctcttcctggacgtgttgttccccttggatctcaaaaaggtcatcttcgtcgacgcggatcagattgtcaggacagacatgtacgagctcgtgcagcatgatttgcagggcgcgccatatggttttacacccatgggcgactcacgcactgagatggaaggtttccgattctggaagactggctattgggctaacttcttacgtggccgtccataccacatctccgcgctctacgttgttgatcttgttcgtttccgtcagctcgcagccggagatcgactacgccagcaataccactccctctctgctgatcccaactccctttccaacctggaccaggatctgcccaacaacatgcaattcaatctcccaatccacagtctaccacaggaatggctctggtgcgagacctggtgcagcgacgaggatctggccaaagcaaagactatcgacttgtgcaacaaccctcaaaccaaggaaccgaagctggatcgtgcgagaagacaagttccagagtggaacgtgtacgatgaggagattgcagcgctggcgagacgcgtcaagggagagaagaaggctgcagaggtggtagatgtacaggagcaggagcagcttagggagaagaaggagaaggatgccgagaagaaggtagagcacaatgagttgtaa

SEQ ID NO: 57 - protein, 1620 aa, Puccinia graminis
MKRSRGLRDRLGLLLTLGVDILAGSPPISVSIQATWQEPPMLIQVLESAALERPGLFFSSIDAVCSGWESSKRSTDQQTYEYLTSLLRSPGLLDGPGELESLAFSIALKEAQPKIEAFRVWYASLPSNLTGQSETQASESDDCKSWTLINNSRICDTSKLSELLDSNDPSEKIQSQPQVLPFDHQQGQSHENARLPIAILYASPDPSSFCPFHQVLHKASKELPSKATYIFRWKIPSAPSSSTKSQSASLLSGWGASLDIKKSEYLTLDDRPVESSSSDDPQLILDGTKQPAGRESQVDSEPAKLKPLKAAEIFDIGAKATQHVLSSPSPLTALRHLTEDFPLIAHTLVNEWVPGRISRELRLELKENMEDGIPPGRSVVWMNGLQLSSLVSLENLNLFKLVEIMRNERRWITSLTSLGINSLQARKLIVDEKLNSAMNPEAASASASGEMDASSLGARFDASDRQEGGGAIIWFNDLEKDERYSMWPTTLRAILRPTFPGQLHPIGRNLINVVLGLDLTQTQNLHNLGHVIEVFIARSLPIRWGVVPIPTKNPSQAEKMSRSFWNMIEALGPIETLKFIKEFTQDLEPESGAIDVEKFISKANQSVLSAEEESPEDPQSKEERFQVWLTKSQLYSSRLSLCSNDHSLPACMMINGRFFPMEENYRTHLQETATLHTGFIQHQVYFNLLKDDANVAEYLYDLPLVHRARNDLVFPSEARPLQFVDLVEALQSSDALAANVFFRNEAAPVKNGDPRPIASLWVVGNLDSNTGMSAVAAALGLLMKPFPNVSTQVSFVHVPSDDTEISTEISTDLSALITTSDVQKITIQDLLDKLSGHGHQAMTSDDGDSTKTEKNSELVLKKIQTKASDLPNIKNRAWFGAQEFGKAIGAKRDGIAIVINGRLLQVSSTSKLLSEDLVLLVEYETQQRINPLMEALKSLEEFDVKQHHANLPLIMSTVGFVLVGSNDGSTQTSSSEARSDKHLARNGVHSSYQHGDEAKALFDFSVVLNPTSEAAQRWSALLDTLSHRSDVAMKVWFNPSLEVSELPIKRFFRTAISNSLEFDKNGRVIPALVNFHGIPTETLFTLAIDSPPAWLALPHDSIHDLDNIMLSELPPAYSSQGVEAIFQLEHIILAGHAREVPSDIPPRGLQIVLSDLLRNQEVDTIIMANLGYFQFKSAPGIHRLSIRPGRSLELYQFEKTDSSADGNDESHQLLSLTTFNGLTIYPRVRKRPDKIGENLIQPLSTSPTTSKKGPAAEFSKLMGQNQGIDLANGASRSVINVFTVASGLLYERMAYLMCVSVMRHTQSPVKFWFISNFLSPSFKRFIPHLAREYGFDYQLVTYRWPSWLRAQKEKQRVIWGYKILFLDVLFPLEVDRVIFVDSDQIVRTDLKALVDLDLGGAPYAYAPMCNDRNETKGFRFWDTGYWKESLQGRPYHISALYVVDLRVFRTVAAGDQLRQHYQALSADPGSLANLDQDLPNNMQGILPIFTLDQSWLWCETWCSDEGLKTAKTIDLCNNPLTHEPKLKRARRLIPEWDAYDQEVAALAARIKKNNQGDLAAKITVQAGQKIEDDQDLSSDPLSESDHLEKEQEDVMLDSSGLNQENPSTLLDKEGVSRDEL

SEQ ID NO: 58 - DNA, 4863 bp, Puccinia graminis
atgaaacgatcgcgaggtcttcgagaccgtctgggcttacttctaactctaggcgtcgatattcttgctggctcacctccgatctccgtctcgattcaggcaacatggcaggaaccaccgatgttgattcaagtcttggaatctgctgctttagaacgtcctgggttatttttttcgtcaatagatgccgtttgctcaggttgggagagctcgaagaggtcgaccgatcaacaaacatacgagtacctcaccagtcttctccggtcaccaggattactcgatggtccgggtgaattggagtccctagcatttagtattgctctcaaagaagctcagcctaaaatcgaagctttccgagtgtggtatgcctcactcccctcgaaccttaccggccaatccgaaactcaagcttcagaatcagatgattgcaaaagctggacgttgatcaacaattcaagaatttgtgacacttcaaagctctctgaattattagactccaatgatccatccgaaaaaattcaatcgcaacctcaagttcttcctttcgatcatcagcagggccagtcacatgaaaacgcacgtttaccaatcgcaatcctgtatgcctccccggaccccagctccttttgtccttttcatcaagtgctacacaaagcttcgaaggagcttccctctaaggccacttacatctttcgatggaaaataccctctgcaccatcgtcctcaacaaagtctcaatcggccagtcttttgagtggatggggtgctagcttagatatcaaaaagtcagaatacttgacgttggatgaccgccccgtggaatcctcctccagtgacgatccacaactgatactcgatggtacaaaacaaccagctggaagggagagccaagtcgattctgaaccggccaagctgaagccattgaaggcagccgagatctttgacataggcgccaaggctactcagcatgttctttcatcaccctcgcctctaacagctttacggcacttgaccgaagattttccattgattgcacacactttggtgaatgaatgggtgcctggaagaatctcgagagagctcagattagagcttaaagaaaacatggaagatggaattcccccgggtcggtctgttgtctggatgaacggacttcaactctcgtccctggtctctctggaaaacctcaacttattcaagctggtcgaaatcatgagaaacgaacgtcgttggattacctctttgacttccttaggaatcaattcacttcaagctcggaagttgattgtcgatgagaagttaaactcggctatgaacccagaagcggcatctgcctcggcaagtggggaaatggatgccagctcgttgggcgcaagattcgatgccagtgatcggcaagaaggtggaggagctattatttggtttaatgacctggagaaggatgaaagatattcgatgtggcctactaccttacgagcgattcttcgtccaactttccctggtcaattacatcccatcggtcgtaatttaatcaatgttgtcttaggtcttgaccttacccagacccaaaatcttcacaatttgggccatgtgatcgaagtttttattgcacgtagtttgcccatccgatggggtgtcgtcccaatccctacaaagaacccatcccaggcagaaaaaatgtcaagatctttctggaatatgattgaggctttagggccgattgagaccctaaaatttatcaaagagttcacgcaagatttggagccggaatcaggagcgatagatgttgagaaatttatctcaaaggctaaccaaagtgtgctctcggccgaagaggaatcgccagaagatccccagtcgaaggaagagaggtttcaagtctggctgactaagtctcaactgtattcttcaagattatcgttgtgttcgaatgatcacagtcttccagcttgtatgatgatcaacgggcgttttttccctatggaggagaattatcgaactcatcttcaagagacggcaacacttcataccggatttatacaacatcaagtgtatttcaacttgctgaaggatgatgctaatgtggcggagtacctctatgatcttcccttagtccatcgagcacggaacgacctggtgttcccatctgaagccagaccattgcaatttgttgatctggtcgaggctcttcaatcttccgatgctcttgcggccaatgtgtttttccggaatgaagctgcgcctgtgaagaatggtgatccgcggcccattgcatccttgtgggtggttggaaatctcgattccaataccgggatgtctgccgttgcagccgcgttgggcttgctgatgaaaccgtttcccaatgtttctactcaagtatcctttgttcacgtaccttcggacgacaccgagatctcgacggagatatcgaccgatttaagcgcacttatcacaacttccgatgttcaaaagataaccatccaggatttgcttgacaaacttagtggtcatggacatcaagctatgacttcagatgacggggactcaaccaagacggagaaaaactcggagttggtcttgaaaaagatacagacaaaagcatcagatctgcccaacataaaaaaccgcgcatggtttggcgctcaagagtttggaaaggccattggcgctaaaagagatggcatcgcaatcgtcatcaacggccggcttttacaagtctcttctacctcgaagttactcagcgaagatctggtcctacttgttgagtatgaaactcagcagcgcattaacccattgatggaagcgttaaagagtcttgaagaatttgacgtaaaacaacatcatgccaatcttccgttgattatgtcgacggtcggttttgtcttggtgggctcaaacgatggctccactcaaacctcctcctctgaggcccgctctgataaacatctggctcgcaatggtgtccattcatcctatcaacacggtgatgaagcaaaggcattatttgatttcagcgtggtcttgaatcccaccagtgaagctgcacagcgatggtcagcgctgttggatacattatctcaccgttcagatgtcgcgatgaaagtttggttcaatccctctttggaggttagcgagctcccgatcaaacgtttcttcagaacagctatctcaaactctttagagttcgacaaaaatgggcgcgtcatcccagcgcttgtcaacttccacggtatcccaacagagacactattcacattggccatagattccccaccggcctggctcgctctgccccatgattccattcatgatctcgataatattatgctttcggagctcccacctgcttacagttcacagggagtcgaggccatctttcaactggaacatatcatcttagctgggcacgcgcgtgaggtgccgagtgatatacccccaagaggcttgcaaatagtcttatcagacctgctcagaaatcaagaggtcgacacgatcattatggctaatctgggttacttccaattcaaatctgcaccgggaatacatcgattgtctatccgtccaggaagaagtctggagctatatcagttcgaaaagactgattcttcagcggacgggaacgatgaatctcaccagcttttatccttgaccactttcaacggcttgactatctatcctcgggtccggaaacgtcctgataaaataggcgaaaacttgatccaaccgctttcgacctctccgaccacctccaaaaaaggccctgctgccgaattttccaagctcatgggtcagaatcaaggaattgatctcgccaacggagcttcacgatcagtcatcaatgtgtttacagttgcttcaggattgttatacgagcgtatggcgtatctgatgtgtgtcagtgtcatgcgacacacccaaagcccggtgaaattttggttcatctccaactttctttcaccgtccttcaagagattcattcctcacttggctcgagagtatggctttgattatcaattggtcacttatcgttggccatcctggttacgcgcccaaaaggagaaacagagggtgatctggggttataaaattttgttcttggatgtcctttttcccttagaggtagatcgagtgatctttgtcgactcagatcagattgtccggactgatttgaaagctttggtcgaccttgatctgggaggagctccctatgcatatgcaccaatgtgtaatgataggaatgagaccaagggattccgattttgggacactggatattggaaagaaagtcttcaaggccgaccttaccacatcagcgctctgtacgtcgtggacttgagagtttttcgaaccgtggctgctggtgatcaattgcgacagcattatcaagcgctttctgctgatcctggaagcttggctaacctcgaccaagaccttcctaataatatgcaaggaatcttaccgatattcaccttggatcaaagttggctatggtgtgagacttggtgttcggacgaaggtttgaagacggctaagacgatagatttatgtaataacccattgacgcatgaaccgaagctgaagcgggctcgacgactgattccagaatgggacgcctatgatcaagaggttgcagctttggcggcaaggattaagaagaataatcagggcgatttggcggcgaagattactgtccaggctggccagaaaatcgaagatgatcaggatctttcatccgaccctctttcagagtcagatcatctcgagaaggagcaggaggatgttatgcttgactcttctggccttaatcaagaaaatccttcgactcttcttgataaagaaggtgtcagtagagatgagctatga

SEQ ID NO: 59 - protein, 1483 aa, Trichoderma virens
MTRHRCWPWNLTVGLMLALQAHSTPSVNVGMNAAFPAGPYLLELLETAAAENSSSYFPLLDRIAAGSFASASTDAALYSEVLDVLQKDGSISGSEALSTFKLALSLRSAAPRIEAHYQYYTTAVAPTVDDPECVNWVLLEGKQYCTPELDKVNRDGLLSLQAKHLPFDRTLGTGKEAILYADPTSNTFGAFHKALAEAARQGSLSYRIRYRRTETTHAAALPMSGYGVELALKKTDYIVIDDRLHGEEAHHESPSSSTNLDDSEDVADIKPLAASDLSSLGMKAASFILQSDEPLETLVKLSQDLPKFLTSIVAHNVSAQFEEEFQSNGVKGVPDGVNILLVNGVQVSERQIEPFALIERLRQERKLIDGFRTLGLSGKQAVSILGHQAVSIAKDSTEPLRYDWTDRLEDGRVLIWLNDLESDDAYKDYPKTLASLLRGAYPGQLPPIAKNIFTLVAPVDFSSSEDISFITQLLSFISRGIAIRFGLVPLMSTPEATAKAKIVYHIFENYGIQGLASYLGRLQDYATALTNEELFAEITRDQTLLEDSEKMELVDVLERETYEQQLKLAQQWINRLKAETPIRPIFFNGLLIPRDDNWIQGLGMQIGDDLQTVQKGVFHGILSDDDWAPSVFLSNAITRRNSYISPEDEKKSLRVLNINKLYNEHADLFESVPVLDALAGLQKEDWAVMTVIADLTTTSGKALVLSALEFKRNNPGARIDFVHNPVAAAGAASVNAALRANQGSLSDVQDADKLTSLMETQSEDLNDDYFAALEQFLGTAKILSGAQMIMLNGRLIGPISEDSQFDVDDFQQFLEVERTKRILPVYAAIEELGLGDTLATPIDAAKLTSITALSTISNLPEGIFESTSSARTTLYNTWDSTYTTIEKGDQETASIYIVGLVNPVSEQGQRWAPILKVLSELQGVHLKLFVNPTAKIEELPVKRFFRYVLESQPSFDEEGGVKRLEATFNGLPSEALLTTAVDVPPAWLVAPLVSIHDLDNIKLSAVKTDVHATYVLKHILIEGHSREGKGSAPRGTQLVLATEKDPLVTDTIVMSNLGFFQFKANPGVYTIQLKEGRNAEIYEIESIGAQGWSPVPGDNGTELALIDFQGVTLYPRLNRRSGMEAEDVLQEKDAQENNLVAKGFKLAEGLFGGKSKKKSLSEQEHAEINIFSVASGHLYERMLNIMMVSVMRHTKHTVKFWFIEQFLSPSFKEFIPQMAKEYGFKYEMVSYKWPHWLRQQKEKQREIWGYKILFLDVLFPLSLDKVIFVDADQIVRTDMMNLMNLDLEGAPYGFTPMCDSRTEMEGFRFWKTGYWANYLRGRPYHISALYVVDLRRFRELAAGDRLRQQYHSLSADPNSLANLDQDLPNHMQFQIPIHSLPQEWLWCETWCSDESLGEARTIDLCNNPLTKEPKLDRARRQVPEWVTYDEEIAALSQLSKGEAGITNKEKLSNNGDSDAAESQGKNTKSRNLESEKTHTMDEL

SEQ ID NO: 60 - DNA, 4452 bp, Trichoderma virens
atgacacggcatcgctgctggccatggaacttaacagtcggccttatgcttgctttgcaagcccacagcactccctctgtgaatgtgggcatgaatgcagccttccctgccggcccatatctacttgaactcttagagaccgcagcggcagagaattcctcgtcatattttccccttctagaccgaattgcggctgggtcctttgcctccgcttctacagatgctgctttgtattctgaggttcttgatgtcttgcaaaaagatggcagcatatctggctccgaggccttgtctacattcaagcttgctttgtctttgcgctcggctgcccctcggatagaagctcattatcaatactacacaaccgcggttgcacccacagtcgacgatccagaatgtgtcaactgggtgctactagagggaaagcaatattgtactcccgaactggacaaagtaaacagggatggtctactttctttgcaagcgaaacatttgccattcgatcgaacccttggcaccggtaaagaagctatcctctatgccgacccgacttccaacacatttggtgcattccacaaggctcttgccgaggccgcaaggcaaggttctttgagttatcggattagataccgccgtactgaaacaacacatgcagcagctttgcctatgagcggatatggtgttgagctagcgctgaagaaaaccgattacatcgtcattgatgatcgattacacggtgaagaagctcatcatgagagccctagctccagcaccaaccttgacgacagtgaggatgtggccgatatcaaacctttggcagcatcagacctctcatcactcggaatgaaagcggcatcatttatattacaaagcgacgagccactggagacacttgtaaaattatcacaggatctgcccaagtttctgacgtcgattgttgcccacaatgtgtcagcgcaatttgaagaggagttccaaagcaacggcgtaaaaggagtgccggatggagtgaacatcctattagtaaatggcgttcaagtcagcgaacggcagattgagccttttgctctcatcgaaagactacgccaagagcgaaaacttattgacggtttccgtacccttggtctcagtgggaaacaagcggtatctattcttgggcatcaagctgtatccattgcaaaggactctactgagccgttgcgatacgactggacagatcgtctcgaagatgggcgagttttaatatggctgaatgacctcgaaagtgatgatgcatacaaagactacccaaaaaccttggcatcgttattgcgaggagcatatcctggacaattgccccccattgcgaaaaatatcttcactctcgtggcgcctgtcgatttttcaagctcggaagatatatcattcattacgcaactactgtcattcatttcacgaggcatcgctatcagatttggtcttgtccctttgatgtcaacgcctgaggctaccgccaaagccaagatagtctatcacatattcgagaattacggcatccaaggccttgctagctatttagggaggctccaggactatgctacagcattgaccaacgaagagctttttgcagagataaccagggaccaaacactccttgaggattcggagaagatggagctcgtcgacgtccttgaaagggagacttacgagcaacagctcaaacttgcccagcaatggattaatcggttgaaagctgaaaccccgattcgaccgatatttttcaatggcctgttaattccacgcgacgacaattggatccagggacttggcatgcagatcggcgacgatcttcaaacagtgcaaaagggagtctttcacggcattctctctgacgatgactgggctcccagtgttttcctaagcaatgcaattaccaggaggaacagctatatatcccccgaagatgagaaaaagagtctcagggtgctcaacatcaacaaactttacaacgagcatgcagatctttttgaaagcgtcccggttctcgatgcgcttgcggggttgcaaaaggaagactgggcagtaatgaccgtcatcgccgatctcacaacaacaagcggcaaagcgttagttttgtccgccctggagttcaaacgcaataacccgggcgccaggatcgactttgttcacaatcctgtggctgctgctggcgctgcctcggttaatgctgccctccgagccaaccaaggatcgctgagtgatgtccaggatgcagacaaacttacaagcttgatggaaacacaatctgaagatcttaacgatgattacttcgcagctttagagcagttccttggcaccgccaagatcctctctggagctcagatgattatgctaaacggtcgattgattggacctatttctgaagactctcagttcgatgtggacgactttcaacaatttctggaagttgaacgaacgaagcgtatcctccctgtatatgcagctatcgaagaactcggtctaggcgatacactggctactccaattgacgcagctaaattaacttccatcactgccctctctacaatttccaatcttcccgaaggaatattcgaatcaacgtcatctgcccgaactactctttataatacctgggattcaacttatacaactattgaaaagggcgatcaagagactgcaagcatatacatcgttggcctcgtaaatccagtcagtgagcaaggccaaaggtgggctcccattttgaaggtgctctctgagctacagggggttcacctaaagcttttcgtcaaccccacggcaaagattgaggaacttccagtgaagcgctttttccgatatgtgttggagtcccagccgtcattcgacgaagaggggggcgttaagaggctagaagctaccttcaatggcctgccctctgaagctttgttgacaaccgccgttgatgtgccacctgcatggctggtagcacctctggtttcgattcatgatctcgacaacatcaaattgagtgcagtaaaaaccgacgtccacgcaacctatgtgttgaaacacattcttattgagggacattctagggagggcaagggatcggcgccacgaggaactcagttggttcttgctacagagaaagatcctcttgtcacagacaccatagtcatgtcgaaccttggctttttccaattcaaggctaatcctggagtttacactatccaactgaaggaaggccgcaacgctgagatatatgagatcgagagcattggtgcccagggatggagccccgtgcctggcgacaacggcactgagctcgcgttgattgacttccaaggcgtgaccctatatccccgtctcaatagacgaagtggcatggaagcggaggatgttcttcaagagaaagatgctcaagagaacaatctagtcgccaaggggtttaagctggcagaaggactctttggcggaaaatccaaaaagaaatcgctttctgagcaggaacatgcagagatcaacattttctctgttgccagtggccacctctatgagcgaatgctgaatatcatgatggtctcagtgatgcgccatacaaagcacacagtcaaattctggttcattgagcaattcctttccccctccttcaaggagttcatcccacaaatggcaaaggagtacggttttaaatatgaaatggtatcatataaatggcctcactggttacggcaacagaaggagaaacagcgagagatttggggctacaagatcctcttcttggatgtcctattccccctgtctttagacaaggtcatctttgtagatgcagatcagattgtgcgcaccgatatgatgaacctgatgaacctcgatcttgaaggcgccccgtatggatttaccccaatgtgcgactctcgcaccgagatggaaggcttccgtttctggaaaaccggatactgggcgaattacctccgcggtcgtccataccacatctctgccctctacgttgtggacttgcggcgcttccgagagctcgctgcaggcgaccgccttcgccagcaataccactcgctctccgccgacccgaacagcctcgcaaatctggaccaagacttgccgaatcatatgcagttccagatccctatccacagcttgcctcaggagtggctctggtgtgagacttggtgcagcgacgaaagcctcggcgaagctcgcaccattgacttgtgcaacaatcctctgacgaaggagcctaagcttgaccgagcgagaaggcaggttcctgaatgggttacctatgatgaggagatcgcagccttgagccagctctctaagggagaggcgggaatcactaacaaagaaaagctttctaacaatggcgactcggacgcagctgagtcgcaaggcaagaacactaaaagtcggaatctagaaagtgaaaagacacacacgatggatgaactgtaa

SEQ ID NO: 61 - protein, 1493 aa, Sclerotinia sclerotiorum
MGAFKFPWGLSGALLASTYLHSIGVTASPSINVGLQTSFPSAPYLLELLETAATENVSSYFPLLDRIADGYFTKASTDRDLYDQFIQILKEDGHMDAESLSSYQLALSMRVAAPRIEAQFQYYHTAVEASIKREKDSSCPTWVLFDGNQYCSPTLNEPHGKVNGPSQTKELPFDYVLGNPDGPHSILYVDITSPTFGHFHKTLVKTAREGKTSYRLRHRRAIDSGSNKPLMIPGYGVELALKRTDYIVIDDRKDDDEEVPKSKTETKVKFEDEEVADLKPLSTSELSSLGLKASSFIMQSENPFDTLIKLSQDFPKHSSAIASYNVSSDFLAEHNYNRGKLVPAGFNVWWVNGVQMIERQIDAITMLDIMRKERKLINGVSELGLTGPEAVQLLSHPDISDAKSDGDVQRFDWRDEIEGGRVIMWLNDIEKDKRYAEFPAALGALLQRTYPGQLPSVRKEIFNLVVPVDFSTPEDIALVSETLASFVKRKLVLHIGLVPITTSPAAIEQARVLYHLLDVYGLSGAIAYLEASVLNGVASPTEKAFEAAIEGREVRAEKVAIPLKDLLESDYYSDRIDASNRWSTRLSANGEFPPIFVDGVALPRDDNWLQGMVQRLTVDLQVIQQGVFNEIFTQDSYIPDFFLSEATARRNALIIPESDKNLKIIDITILSKHHGDVLSKLPKIGADSAWSKEDWAHMVLVADLSSVTGMDLLLSAAKFRESTSPLEITIIHNPSSDKETSDFSTRLFSHIQKRSDETFVDAQDLPTLANQDELELDYTTKDSAKTYWKLAGPLIRSAGLLPGESGLLLNGRLVGPIPAGSELKQEDFEQLISYERAKRIIPVFAAMKALGLSEKITDPLTGAKISSMVALASVSDTPDGIFEQAPTTRVSAFDIWNSSYTSIEAGDSSTATIHMTVAIDPASEQGQKWVPIVKAISELEGVYLKMFLNPKELLQELPVKRFYRYVLDSKPTFNDDGALITPGASFTGVPQEALLTVKLDIPPAWLVAPKASIHDPDNIKLSSIKSDVDALYELEHILIEGHSREMPSGSPPRGAQLILGTEKDPHFADTIIMSNLGYFQFKANPGFYKIDLQNGRSSEIFKIDSIGSKGWAPVPGDESTEVVLMSFQGATLYPRLSRKPGMEGEDVLEAKVESAMDFVSRGLNFAQGLLGSKNKATAAVEEHAEINIFSVASGHLYERMLNIMMVSVMKNTKHTVKFWFIEQFLSPSFKDFIPHLAAEYGFKYEMVTYKWPHWLRGQTEKQREIWGYKILFLDVLFPLSLDKVIFVDADQIVRTDMIELVNHDLQGAPYGFTPMCDSRTEMEGFRFWKQGYWKKFLRGLPYHISALYVVDLRRFRQIAAGDRLRQQYQSLSADPNSLSNLDQDLPNHMQQVLPIHSLPQEWLWCETWCSDESLKEARTIDLCNNPLTKEPKLDRAKRQVPEWTMYDDEIAAVDRKRKGINGSGSGNEVGDGKNTKSRTLEEVVDTKTKKDEL

SEQ ID NO: 62 - DNA, 4482 bp, Sclerotinia sclerotiorum
atgggagccttcaagttcccttggggactctcgggagctctattggcatctacatatcttcattccataggtgtcactgctagcccatccatcaatgttggcttgcaaacatcttttccatccgccccgtatctccttgagctcctagagacagcagcaactgaaaatgtttcctcatactttcctcttcttgaccgaattgcagatggctattttaccaaagcttccacagatagagacctatatgaccaatttatacaaattctcaaagaagatggacatatggatgctgagtccctttcgtcataccagcttgcattatccatgagagttgccgcacctcgtattgaagcacaatttcaatattaccataccgctgtagaagcctcaataaaaagagagaaagactcttcctgtccaacgtgggtgctctttgatgggaaccaatattgttcaccaacattaaatgagccccatggaaaagtaaacgggccttcacaaacaaaagaactaccattcgattatgttcttgggaatcctgacggacctcattctatattatatgttgatataacatctccaacatttggacattttcacaagactttggtgaaaactgcccgtgaaggtaaaacatcttatcgtctccgtcataggcgagctattgattctggctcaaataagcctctaatgattccgggctatggcgtagaactcgctctcaaaagaactgattatatcgtgattgacgaccgcaaagatgatgatgaagaggtaccaaaatccaagaccgagaccaaagtcaagtttgaagatgaagaggtggcggaccttaagcctctctctacatcagagctctcttcccttggcctgaaggcatctagtttcattatgcagagtgaaaacccatttgacacactcattaagctttcacaagatttcccaaaacattctagtgcgattgcttcttataatgtttcttccgactttcttgcagagcacaattacaaccgcggcaaactcgtccctgcgggcttcaacgtatggtgggtaaatggcgtgcagatgattgagcgtcaaattgatgctataaccatgctcgatattatgcggaaggagagaaaattgattaatggtgttagcgagcttggtttgacaggacctgaagctgtccagctactttcccaccctgacatttccgacgcgaaaagtgatggagacgttcagagatttgattggagagatgagatcgagggtggtagagttatcatgtggttgaatgatatcgaaaaggacaagcgctacgcagaattcccggcagcacttggtgctttacttcaaagaacgtatcctggccagctaccctcagttcgcaaggaaattttcaatctagttgtaccagtggactttagcacgccggaggatatcgctcttgtttctgagactttagcaagcttcgtcaagcgaaagttggtcctccatattggacttgttccaattacaacgtctccagccgctatagagcaagcgcgagtcttgtatcatcttttagatgtctatggactctctggagctattgcttatcttgaagcctccgttttgaatggagttgccagtcctaccgaaaaggcttttgaggccgctattgagggacgcgaggttcgagctgagaaagtagcaatccccctgaaagatttattggaatcagattattacagtgatcgaatcgacgcgtccaaccgctggagcacaagactctccgccaatggcgaatttccaccgatatttgtggatggtgttgcacttcctagagatgataattggttgcaaggaatggttcaacgtctcaccgtagacttgcaggttatccagcagggggtattcaacgaaatttttactcaggattcctacattccagatttcttcctctctgaagcaacagcacgaagaaacgcccttatcatcccagaaagtgacaaaaacctcaaaataattgatatcaccattctctcaaaacaccatggtgatgtgttatccaaattacccaagattggagcagattcggcatggtctaaggaagattgggctcacatggttttggtagcagacttatcgtccgttacgggtatggatctcctcttgtctgcggctaagttcagggagtccacctcgcctcttgagattactatcatacataatccttctagtgataaggaaacatctgattttagcactcgtctgttttcacatatccaaaaaaggtccgatgaaacatttgtggacgcgcaggatttacctactttggcgaaccaggacgaacttgaattggattacacgaccaaagactctgcaaagacctactggaagcttgctggtccattgatccgatctgcgggtttattgccaggtgaaagtggcttactgctcaatggaaggcttgttggaccaatacccgctggttccgaactgaaacaagaagactttgagcagttgatttcatatgaacgtgcgaaacgtataattccggtctttgctgcgatgaaagctcttggtttgtcagaaaaaattactgatcctttaactggtgcgaagatttcttccatggtggcgctggcatctgtgtcagatacacctgatggtatatttgaacaggcaccaaccaccagagtaagtgcatttgatatttggaactcttcttatacatccattgaagccggagattcatccacagcaactatacacatgactgtcgctattgacccggccagtgagcagggacaaaaatgggtaccaattgtaaaggccatttccgagcttgaaggagtatatcttaagatgtttctgaatccaaaagaacttcttcaggaacttccagtcaagagattttacagatatgttctagactcaaagcctactttcaatgatgatggggctttaataacccctggtgcctcattcaccggcgtgccacaggaagcgttgttaactgtcaaactggatataccaccggcttggctagttgcccccaaagcctcaattcatgatccagataacatcaaactcagctctattaagtctgatgtagatgctttgtatgagcttgagcatattcttattgaaggccactcacgcgagatgccatctggcagtcctcctcgcggagcacaacttattctaggaactgaaaaggacccacattttgctgataccatcatcatgtctaatctaggctatttccagttcaaagcaaatcctggattctacaagattgatttacagaatggaaggagctctgaaattttcaaaatagacagcataggctcaaagggatgggctcctgtgcctggtgatgagtccactgaggttgttctcatgagttttcagggagctactttatatccccgtctttcccgcaagcctggtatggagggtgaagatgtcctcgaggctaaggttgagtcggcaatggattttgtatcccgcggacttaactttgcgcaaggtcttttgggtagcaagaataaagctactgccgcagtggaagagcatgccgagatcaatatcttttctgttgctagtggccatctttatgagcgtatgctgaacatcatgatggtcagtgtcatgaagaacacaaagcacacagtcaaattctggttcattgaacagtttctatctccatctttcaaagatttcattcctcatctcgccgctgaatatggctttaagtatgagatggtaacatataaatggcctcattggctccgagggcaaacggaaaagcaacgtgaaatctggggttataagattctctttttggatgtccttttcccattatccctcgataaggtcatctttgtggacgccgatcaaatcgttcgtacagatatgattgaactcgtaaatcatgacctccagggtgcaccatacggcttcactcccatgtgcgacagccgcaccgaaatggagggtttccgcttttggaagcaaggttactggaagaaatttcttcgaggcctaccctatcatatcagtgccctctacgttgtagatcttcgccgcttccgccaaattgctgcaggggaccgtcttcgtcaacaatatcaatctctctccgcagacccaaatagtttgtcaaacttagatcaagatttaccaaatcatatgcaacaggttcttcctattcatagtttgccacaagaatggctctggtgcgagacttggtgtagtgatgagagtctcaaagaagcgagaacgattgatttgtgtaataatccgttgacaaaagaacctaaattggatagggcgaaaagacaggttcccgagtggacgatgtatgatgatgagattgcggcagtggatcggaagaggaagggaattaatggaagcggaagtggaaatgaagttggggatggtaaaaatactaaaagtagaactttggaagaggtggtggatacaaagactaagaaagatgagttataa

SEQ ID NO: 63 - protein, 1365 aa, Saccharomyces cerevisiae
MRLLALVLLLLCAPLRAWTYSLRYGIPESAQVWSILVHLLGDVDNQLLTNLYPLVTGLDDEIDIQENLVALTSNVLRERYDKEDVADLLELYASLYPMGMIQHDISSNAEQDDANSSYFVLNGNRYEKPDDVFYLKSKDLTIQQKVPDVDVIQPYDVVIGTNSEAPILILYGCPTVIDSDFEEFNRNLFMEAMNGEGKFRFIWRSTCSLDGKSVEYPLTHPLEITLQNGSRMSSIPQLKKILYTVPKEILVGADNDDQLHDLEPEELRELDLRVTSLISEFYQYKKDITATLNFTKSIVNNFPLISKQLIKVSSVNKDIITSNEELNSKGFDYNMLGLYINGQNWKITSLTPYNLLTALKTEYQSLLKITNLLQELEPSKCILDSKFLLNKFSQFSLGKLQNLQPIKMDLHTIPGFSESVIYFNDIESDPQYDELVNSVQAFFDKSKFGELPEIKQNWSEIIFVIDFARLEDSEVKEALGGLVRAVNVVSQGYPQRVGLLPFSSDSDKSVVNKIYELKNSTDNLTELKSFLETMLLADGLSANAKHSKHIPVPDVFHLLDELQIDETSIIINGEIYPFRKNAWNYLIAKVIKKDTEFIRKELSNFSPKNKQISVRDLLHYKSANLRHNKYTPNYFADSVYSSVNNTALESVCSERIGYYTKNEEYNLLHTITLVDDFGSIHALKRLRNLLHTSFVGVRIRIIHVGDISDIWYQLRGSLSQKDPIGSINTFIDALKLKKVKSHTYKKSGLNQLGLHKWLPDIPLFELQKGSFIALNGRFIHLDQNEVPETKHFEAIIKREALRTIDSVFALDLLFPGFSQEIINPDLIEMISSILTRLFYQGTHIYNNGIDYTTESSLPRMDLSEFFRPNNLTMFEDGKSAPIDLLLILDPLEERTQMILSLVEQFRPLKFVNIQVILMPTLELNIVPIRRIYVDDADIVKSITSEDSRSDPEVDIEMDVPNSFIVDNNYRIKKLLIELHSFSSKTVLSAGNIDGMGGVCLALVDSAGNIIDKTTTMKTFGYGQFHTDKFLKGCYIKSCDSRYTVQSFSTDGHPDFIPSDSLDILSYNPQKIAVKISEEPTHEEEYEEGRNNDTIINIFTILESGPDEEERYMQMILSILSKCPETQKVNFFILDQPFISDTLRKSCEYINSSDEMRGNVIFLNYEWPQWLRPQRFSSRRRDVSRFLFLDVLLPQNISKVLYMSPTEVPLDPFDIFQFQGLKRAPLGLFRMSGDGYWKEGYWEKMLRENNLEFYSTEPAFLVNLERFRELDAGDKYRIHYQRISTDAMSLVNIGQDLVNNLQLEVPIRFLKGSYKKKLVINDECVSEWKKKINKFASSPGDEDVPGESVSSKYQDSDNAAPLHDEL

SEQ ID NO: 64 - DNA, 4098 bp, Saccharomyces cerevisiae
atgagactacttgcgttggtattgttattgttgtgtgcgccgcttcgtgcatggacttatagcttacgatatggcatacccgaatctgctcaggtctggtctattttagttcatttactgggcgatgttgataatcagctgttaactaatttatatcctttggttaccggtttggatgacgagattgatattcaagaaaatcttgtggcgctaacttccaatgtattaagggagcgatacgataaagaggatgtggctgatttattggaactgtatgctagtctttaccctatgggtatgatacagcacgatatcagttccaatgcagaacaagacgatgcaaatagtagctatttcgttttgaatggtaataggtacgaaaagcccgacgacgtgttctacttgaaatctaaggatttaacaattcaacagaaagtcccagatgttgatgttatacaaccttacgatgttgtcattggtactaactcagaagcgccgatattgatcttgtacggttgtcctaccgttattgactccgacttcgaagaattcaataggaatttatttatggaagcaatgaatggagagggaaaatttagatttatttggagatccacatgttcccttgatgggaaaagcgtggagtatcccttaactcatccgcttgaaattactttacaaaatggttctagaatgagctccatacctcaattaaaaaaaatactatatactgtacccaaagaaatattggttggagcagacaacgatgatcagctccatgatctagaaccagaagaattacgtgaacttgatttgagagtaacatcgttaatctcagaattttaccaatataaaaaggatatcacagccactctaaatttcaccaaaagtattgttaacaactttccactaatctctaaacaactgattaaggtttcatctgttaacaaggatataataacaagtaatgaagaactcaatagtaaaggcttcgattacaacatgctaggtctctatattaatggacagaattggaaaattacctcactgactccgtacaatttgcttactgctttaaaaactgaataccaaagtttactgaaaattacgaaccttttgcaagaactcgagccatcaaaatgcatactagattccaagtttttactcaataagttttctcaattttcattggggaagttgcaaaacttacaaccaatcaaaatggatctccacacaattccagggttctcagaatcagtaatatacttcaatgatatcgaaagcgacccgcaatatgacgaattagtaaatagtgttcaagcattttttgataaatcgaaattcggagagttgcctgaaataaagcaaaactggtcagagatcatattcgttatagatttcgcccgtttagaagatagtgaggtgaaggaggcattgggtgggttggttcgtgccgttaatgttgtctcccagggatatccgcaaagagtcggactattgccatttagttcagatagtgacaagtccgttgttaataaaatttacgagctgaagaactcaactgacaatttaacagaattaaaaagttttttggagacaatgctgcttgcagatggcctttccgcgaatgcaaaacattcaaaacacataccagttccagatgttttccatctacttgatgaacttcaaattgacgaaacatcaattataatcaatggagagatttacccatttagaaaaaatgcttggaattatttaattgcaaaagttatcaaaaaggacactgaatttattcgtaaagaattgagcaatttttctccgaaaaacaaacaaattagcgtaagggacttattgcattacaaatctgcaaatctgagacataataaatatacaccaaattattttgctgattcggtatattcttcggtcaacaatactgcattggaaagcgtatgctcagaaagaataggctactatactaaaaatgaagaatacaatttattacacacaatcacattagtggatgattttggctctattcatgctttgaaaagattgagaaacttgttgcatacttcctttgttggtgttaggatcagaatcattcacgtaggtgatatttctgatatttggtatcaattgcgtggaagtctttcccaaaaagatccaataggctcaataaatacatttattgatgctttgaaacttaaaaaggtaaaaagtcacacgtacaaaaaaagcggcttaaaccagttaggccttcataaatggcttcctgacattccattatttgaattgcaaaagggttcatttattgctttgaacggtagatttattcatcttgatcaaaatgaagtgccagaaacaaaacatttcgaagcaatcataaagagagaagctctaagaacgatcgattcagttttcgccctagatttactttttccaggtttctcacaggaaataatcaatcctgatttgatagaaatgatctcctccattttaactaggttgttttaccaaggtacacatatatacaataatggtattgattataccactgaaagtagcttaccaagaatggatttgagcgagttttttagacctaataatttaacgatgtttgaagatggaaaatcagctcctattgatttactactaattttagatccacttgaagagagaacgcaaatgattctttctcttgttgagcaattcaggcctttgaaatttgttaatattcaggtaattttaatgccgacactggaattaaacattgtccctattagaagaatatacgttgatgacgcagatattgtcaaatcaataacttctgaggatagcagatcagatccagaagtagatattgaaatggatgttcctaattctttcattgtagataataattatcggataaaaaaattgctcatagaattacattccttctctagcaaaacagtcctttcagctggcaatattgatggtatggggggtgtatgcctagcacttgtcgattctgcagggaacattattgacaaaactacaacaatgaaaacctttggctatggacaatttcataccgacaaatttttaaagggttgctatataaaaagttgtgattcaagatataccgttcagtcattttctactgacgggcatcccgactttataccatcagattccttggatatactgtcgtacaatccacaaaaaatcgctgtaaaaatttcagaagagcctacacacgaggaagaatacgaggaaggtcgcaacaatgatacaataatcaatatttttactattttagagtccgggccagatgaggaagagaggtacatgcaaatgattttatccattttgtcaaagtgtcccgaaacgcaaaaggtgaattttttcattttagatcagccgtttatctccgacactttaaggaaatcatgtgagtatataaattcctctgatgaaatgagaggcaatgtcatttttttgaattatgaatggcctcaatggttaagaccgcaaagattttcttcaaggagaagggatgtctctagatttctgttcttggatgtccttttacctcaaaacatctccaaagtgttatatatgagtccaactgaagtaccgctggatccttttgacatttttcaatttcaaggcctcaaacgtgcacctctaggactattccgaatgagtggtgatggttattggaaagaaggatactgggaaaaaatgttaagggagaataatttagaattttattctaccgaaccggcctttttagtaaacttagagaggtttcgggagttagatgctggtgataaatacaggattcactatcaacgtatttctacagacgccatgtctcttgtcaatatcggccaagatctagttaacaacctacaactcgaggttccgattaggtttctcaagggatcgtataagaagaaattagttattaatgatgaatgtgtttctgaatggaagaaaaaaataaataagttcgcatcctctcctggcgatgaagacgtacctggagaaagtgttagcagcaaataccaagattccgacaatgccgctcctctgcatgacgaattataa

SEQ ID NO: 65 - protein, 1678 aa, Ustilago maydis
MKALPLLGIGWAWMALILAFSIPTSTVKAEAPPVKVQLRASWSRIELTSGGSPFLLEVLEAAQAQRPSSFFPLIELLTSKHPPSELLQASDEHVAIIVEELIRSHELFSASSEHAEEALDAWRMSLALSNSSPRIQALVQLYQTLNLDKVWQQGSRNTSCVSWVHHQDQVLCSGNDVRKAIQKSKSASTTQTQIQGVSLGHSRKNTRSKTAAHSFVLYADPYSDNFRELFSTLEEHTSQHDTEFTYTLRWRPSDNHDDRPTSESKSHVQRLSGYGAILDLKKVDYLVIDDRKLKDDSNVGDVGIPGESESEQANAAQRASQDAQWLREQIDADVEASAVTLSSLSNDQIADLGIKAARLILDSSDPLRALQELSQNFPSHATALASSTKWDDASTSAALIDAVLNLASMRIEPGQSDLWLNGQTTNARDFMPLSLLETLRKERGWNHALQHRLAGGGLNVTEAGDLISSSLLGRAWLAQADGNAAAATFDASDRIEIKNAPEGTSTGAITWLNDLEKDQATSEWSNDLMDLLRPLWPGKFPRLSLNLFNVVLVMDLSQKETCRFLSDTVLQSLGRVGLHWGLVPGGLEDEANADSIRMARLFWFLLDHAGAEVTSDVLRKAAASKTGSAGALDVSIAIKEAKFALKSLDAESSLTDQLEKALAGDNDIYIQKESLGRAYIQRLRADRHESLTGHVFVNGQHHAFHPQIVHILHQTIQEQIQALAPQIYYGQISNDTPGLDTYFYDSVGALSFRSALVAGASGAQEGGLVHSAVDLFSALVNDEEVVASNEEVFDFFYPAASQDLMNSTVWVLADVDTQDGLALLTRSFEALARDDAKFRLAVVHRPSAWNDRKTTMSTLLFHLLKQGDLGQLLPSEMLQALRQALDEPSITWQQMSDQLRVHTDGPISESEVRRFWNSVGLAVTSKLAIPEGPAILVDGHLVSNLTVASIEARDITALVEYEAGQKLPYLTQALKLIRRDLDDMDPKQRQSLIFAALSVMNGVYDQTGQGVFTAKTSTRSGLAEQLGTSAHMFEIGHRETADVRITLLLNPISEAAQRWSSTLLMLRELKGVYLRVILNPEIKLSQLPLKRFYRFSSPQRLEFDSDGRVIAPELRFFGMPEEAVLTLGLDAPASWLTMPMEAIYDLDNIRLADVPSTSRAKGVKAVYELKHLLIEGHARELVAGSAVSVPRGLQLLLETPDESKSLDTIVMANLAYFQFKAQPGLWKLRIRPGRSDELYEMQSVGNQGWNSPPVEQTGADVTLDTLSGLTIYPRVAKRSGKEKEELLEQLDAQGRPVKKQNSVDSGLAVSASAAGQLMLSAKDKLFSLARQVGGTTPTHSATAVATARKHADINIFTVASGHLYERMTYIMILSVLKHTSSSVKFWFIENFLSPSFKEFIPHLAAEYGFEYELVTYAWPHWLRAQKEKQRTIWGYKILFLDTLFPLDLGKVIFVDADQVVRTDMQELVDLDLEGKVYGYPPMGDDSEDMDGFRFWKQGYWKDYLRGRPYHISALYVVDLQKFRLFAAGDRLRGQYQALSADPNSLSNLDQDLPNNMQTSIPIHTLEKEWLWCETWCSHDWLKDAKTIDLCSNPKTKEPKLDRAKRQIPEWTLYDAEVARLAQRLVEEKRVGSSVVAPDSQVETRAREHNQQHQANKASQDVPAHEVEAHADAPVHDEL

SEQ ID NO: 66 - DNA, 5037 bp, Ustilago maydis
atgaaggctctgcctttgctcggcatcggctgggcatggatggcactcatcctggccttcagcatcccgacaagcaccgtcaaggccgaagcacctcccgtcaaggttcagctgcgggcgtcatggtccagaatcgaacttacaagcggcggatcgccgttcttactcgaggtgcttgaggcagcccaagcccaacgaccatctagcttcttcccactgatcgagctgctcacaagcaagcaccctccatcagagcttctgcaggcgtcggacgaacacgtagcgatcatcgtggaagagctcatcagatctcatgagctcttctccgcttcctctgagcatgcagaagaggcactggatgcatggcgcatgtcactggcgctcagcaacagcagtccaaggattcaagctctcgttcaactctaccagacattaaacttggacaaggtatggcagcaaggatctcgaaacacttcttgcgttagctgggtgcatcatcaagatcaagtgctgtgttcagggaacgacgttcgcaaagccatccagaagagcaagtccgcatcaacaacgcaaactcaaattcaaggagtatcgctcggtcattctcgcaagaacacacgaagcaagacggcggcgcattcgtttgtgctctatgcagacccatactcggacaactttcgcgagcttttctccactctggaagagcatactagtcaacacgacaccgagttcacatacacgctccgctggagaccctccgacaatcacgacgacaggccgaccagcgaatcaaaatcgcacgtccagcgtctatccggctacggagccattcttgacctgaagaaagtggactaccttgttatcgacgatagaaagctcaaggatgatagcaatgtaggtgatgtcggtatcccgggagagtccgagagcgaacaagcaaacgccgctcaacgagcttcgcaagatgcgcaatggctccgcgaacagatcgatgcagacgtagaagccagcgcagtgacgttgtcatcgctctccaatgaccaaatagcggatcttggcattaaagcggcacgtctgatcttggactcgtccgacccgctgcgtgccctgcaagaactgtcgcaaaacttcccgtcgcacgcaacagcgctcgccagctcgacaaagtgggacgatgccagcacctccgcagcgctcattgatgctgtgctcaatttggccagcatgcgtatcgagccgggccaatctgatctttggctcaatggtcagaccacaaatgcccgagactttatgccactttcgcttctagagaccttgcggaaggagcgaggctggaaccatgctcttcagcatcgtctggcgggaggcgggctgaacgtaactgaggcaggtgatctcatatcttccagtcttttaggacgtgcctggctcgcacaggccgacggcaatgcagccgcagctacttttgatgcaagcgatcgcatcgagatcaagaacgcacctgaaggcacaagtacaggggccatcacctggttgaacgacctcgaaaaagaccaagcgacaagcgaatggtccaacgacctgatggatcttttacgacccttgtggcccggaaagttcccgcgtctctcgctcaatctgttcaatgtagtgcttgtcatggatctgagtcagaaggagacctgtcgcttcctgtccgacacggtgttgcaaagcttgggacgtgtcggcttgcactggggtttagtccccggcgggctcgaggacgaggcgaacgcggattcgatccgtatggcacgtctcttctggttcctactggatcacgcaggcgccgaggtgacctccgatgtactacgaaaggccgcagcaagtaaaaccggttctgcaggtgccctcgatgtttctatcgccattaaagaagccaagtttgcccttaagagcctcgacgccgaaagctctctgaccgaccagctcgagaaagcattggccggtgacaatgacatctacatccaaaaagagagcctcggcagggcatatattcaacgacttcgtgctgatcgtcacgagagcctcactggacacgtctttgtcaacggtcagcatcatgccttccacccacagattgtccacattctccatcaaactattcaggaacaaattcaagcgcttgctccacagatctactacggacagatcagcaatgacactcctggcctcgatacgtatttctacgactcggttggcgcgctgtctttccgatcggcccttgtggccggtgcttctggcgcgcaggaaggcggcctagtgcatagcgctgtggacttgttctcggcgttggtcaacgacgaagaagtggtcgcgtcgaatgaagaggtgtttgactttttctaccctgctgcatcgcaagatttgatgaattcaaccgtctgggtgctcgcagatgtcgacacccaagacggtctggcgttgctgacgcgatctttcgaggcgcttgctcgagacgatgccaaattcaggcttgctgtggtgcaccggccgtcggcttggaacgatcgcaaaaccacaatgtcaacgctgctgttccaccttctgaagcagggggacttgggtcaattgttgccatccgagatgctgcaagcgctgcgacaagctcttgatgagccttctattacttggcagcagatgtcggaccagctgcgcgtgcacactgatggaccaatcagcgaatcggaagtgcgacgcttttggaatagcgtcggtctcgccgttacttctaaactggccattcccgagggacccgcgattctcgttgacggacatctggtctctaacctgacagtggcgtccatcgaagcgcgtgacatcacggcacttgtagagtacgaagcaggtcagaagctgccttacctgacgcaagcactcaagctcatccgacgcgacttggacgacatggacccaaagcagcgacagagcctcatctttgcagctctgtccgtgatgaatggcgtctacgaccaaacaggtcaaggagtgttcacggcaaaaacgagtacgcgctcgggattggcggaacagctgggtacgtcagcgcatatgtttgaaatcggacatcgtgagacggccgatgtgcggatcacgctgttgctcaacccgatctcggaagcggcgcaacgctggtcgagtaccttgctcatgctgcgggagttgaagggagtatacctgcgcgtgattctgaatccggagatcaaattgagccaacttccgctcaagaggttctaccgcttcagttcgccgcagaggctcgaatttgacagcgacggcagggtgattgcgcccgaattgcgattcttcggaatgccagaggaagccgtgctcacgctgggattggacgcgcctgcttcttggctgacaatgcccatggaagcaatctatgacttggacaacattcggcttgcggatgtgccgtcaacatcacgcgccaaaggtgtcaaggcggtgtacgagctcaagcatctgctgatcgagggtcacgcgagagaattggttgccggttccgctgtttcggtaccgcgtggactgcagctgctgttagagacgccggatgagagcaagagtctggatacgattgtcatggccaacctggcgtatttccagtttaaagcacaaccgggcttgtggaagttgcggattcggcctggtcgaagtgacgagctttacgagatgcaaagcgttggaaaccagggatggaacagtccaccggtcgaacagacgggtgccgatgtgactctcgacacgctttcgggtctaaccatctatcctcgcgtcgccaagcgcagtggtaaggagaaggaagaacttctcgagcagctcgatgcgcaaggtcgaccagtcaagaaacagaactcggtggatagtgggttggctgtatctgcatcagcagctggacaactgatgctctcggccaaagacaagcttttctctctcgcacgacaagtcggcggtactacaccaacgcatagcgccactgcggttgcaacagcacgcaaacacgccgatatcaacatcttcaccgtcgccagcggtcacctttacgaacgcatgacgtacattatgattctctctgtgctcaaacacacttcgagcagtgtcaagttctggttcatcgaaaacttcctctctccttcgttcaaggaattcatcccacacctagcggcagaatatggattcgagtacgaattggtgacgtatgcatggccgcattggttgcgggcgcagaaggagaaacaaaggacgatctggggctacaagatcctattcctcgatacgctgttcccgctggatttgggcaaggtcatctttgtcgatgcagatcaagtggtgaggaccgacatgcaggaacttgtggatctggatttggagggtaaagtgtatggctatccaccgatgggcgatgacagtgaagatatggatggctttcgcttctggaaacaagggtactggaaggactacctgcgaggaaggccgtaccatatttcggcgctttatgtggtggatcttcagaaattccgtctgtttgcagcgggagatcgattgcgaggtcagtaccaagcgctttcagccgaccctaactcgctgagcaacctcgaccaagatctgcccaacaacatgcagaccagcataccgatccacacgctcgaaaaagagtggctatggtgcgaaacgtggtgctcgcacgactggctcaaagacgcaaagacgatcgatctctgttcgaatcccaagaccaaggagcccaaattggatcgagccaagagacaaattcccgaatggacgctgtacgatgccgaggtggcaaggctcgcgcagaggttggtcgaggagaagagggttggtagcagtgttgttgcgcctgatagtcaggttgagacgcgcgcgcgagagcacaaccaacagcaccaggcgaacaaggccagccaggatgtgcctgctcacgaggtcgaggctcatgccgatgcacctgttcacgacgagctctaa

SEQ ID NO: 67 - protein, 1676 aa, Ustilago hordei
MRALTLLSVGWAWLALALTLTSAAHLARADSPPAKVQLRASWLKIRLPSNGSPFLLELLEAARSQRPSSFFPLIDLLTSTHTATQLRSASDKWLAQTIENLIRSHQLFGTSQTHVDEALDTWRMSLALKNSTPRIQAFVHLYKALQLEDTWRSRSNKDPCVSWVHHEGKVLCSAEELHQALQDNAASSSAVSSTKQVAFGHPRSASEASYKFDTASSQIFELYADPYSDNFRELFSTLEKHATDAEGGVKYTLRWRPSLDNQPTATSGSQQTTFLSGYGAILDLKKVDYLVIDDRKLKDDSDIGDLGIATNTHDEEAAASQRASADLRWLQDQIGADSFLASTSLSSLTDSEIADLGIKAARLIMSSPDPLRALQELSQNFPSHAAALASSTKFDDGDASAALFEAVLGLSSMRIEPGASDLWLNGKRTPAKEFMPLTLLETLKQERNWSHALQHRLAGGGLNVTEAGDLIASSLVGRAFLAQAEGEGAAAIFDASDRIELKNAPEGTVQGAITWLNDLETDEATKAWSSDLMDLLRPMWPGKFPRLSLNLFNVVLVLDLRQRESCRFLSDTVIQSLGRVGLHWGLVPGGLEDDANSDSIRMARLFWFLLEEASPQVLSDVLRKTAASRAGTADTLDVSLAIKEAKFALKAVDSDETLSSKLDSILAGQDPAYTVREELSKAYINRLRATRQESPTGHVFVNGQHQPFHPQIVHILHQSIQEQIQLLAPQIYYGQLSSLSPGLSTFFYDSVGALSFRSALVPGAGSAADGEEEGVRHEAVDLFSVLVDDDVPSATSEGLFNFFYPSSGSSSSEGEEKPAALLNSTVWVLADLDSQGGLDLLTRTFEALAKEDAKFRLGVVHAPSPASQRSNREVAISTAFHRFLTDSQSSRPSPALIHDALRQPEQLRSALGLSQSSIDSDQAAFRFWNSIALPITAKLDLATPALIVDGHLVSNFDSSTVEARDITALVEYEADQKLPYITQALTLLREDVDSVDPVQRQNLVFASLSVMNGVYDSRRQNAFSSKLASRSGLPEQLGTADHIFEVGDKANADIRITLLLNPLSESAQRWSSILLMLRELEGVYLRVILNPEIKLRELPLKRFYRFSAPHRLQFDLAGKVLSEELQFFNMPEEAVLTMGLDAPAPWLTMPVEAVYDLDNIRLSDVPSSSRGKGVKAVYELKHILIEGHAREKSANSLQVGVPRGLQLLLETPDGSTSLDTIVMANLAYFQFKAQPGLWKLRIRAGRSDELYEMQSVGSAGWDSPSVGVKGDLVTLDTFSGLTIYPRVSKRKGKETEQLLEELDAQGRPVKKTRTASQSTVDGVAVSASNFLSSAKDKITSLANQITSSNPGASNAVATRKHADINIFTVASGHLYERMTYIMILSVLKHTNSSVKFWFIENFLSPSFKEFIPHFAKEYGFEYELVTYAWPHWLRAQREKQRTIWGYKILFLDTLFPLDLSKVIFVDADQVVRTDLKELVDLDLQGKVYGYPPMGDDSEDMDGFRFWKQGYWKDYLRGRPYHISALYVVDLNRFRLFAAGDRLRGQYQALSADPNSLSNLDQDLPNNMQASLPIFTLDKEWLWCETWCSNDWLDKAKTIDLCSNPKTKEPKLNRAKRQIPEWTVYDQEVARLAQRLVEEKVVGKSVVAPESQMEKKQPQEASGLMANDDGTPVHDEL

SEQ ID NO: 68 - DNA, 5031 bp, Ustilago hordei
atgcgagctctgactctgcttagtgtaggttgggcatggctcgccctcgctctcacactgacaagtgctgcacatctagcaagagcagactcacctcctgccaaggtgcagcttcgtgcatcatggctcaagatccgacttcccagcaacggctcacccttcctcctagagcttctcgaagcagcaagatctcaacgtccatctagcttctttcctctcatcgatctgctcaccagcacgcacacggccactcagctgcgttccgcctccgacaaatggctagctcagactatcgagaatctgatcaggtctcaccaactatttggcacatctcaaacacatgtggacgaggccttggacacatggcgcatgtcattggcactcaagaacagcactccgaggatccaagcttttgttcatctgtataaggcgctgcagcttgaagacacatggcggtctaggtcgaacaaggacccgtgcgtgagctgggtacaccacgaaggaaaggttctatgctccgctgaagagttgcaccaggctttgcaggacaatgccgcctcctcgtccgcagtaagctctacgaagcaggtagcattcggtcaccctcgcagtgccagcgaagccagctacaaattcgacacagcaagctcgcagattttcgagctctacgcagacccatactcagataacttccgagagctcttctcgacacttgagaagcacgcgactgatgcagaaggaggcgtcaaatacaccctgcgttggaggccatcgctcgacaatcagccaacagcaacctcaggaagccagcaaaccacctttctgtccggctacggtgcgatcctggacctcaaaaaagtcgactacctcgtcatcgacgaccgcaagctcaaagacgacagcgacatcggcgatctcggcatcgcgaccaacacccacgacgaggaagcagccgcttctcagcgagcttccgccgatcttcgctggctgcaagaccagatcggtgctgactccttcttagcttccacaagtctctcctcactgacagacagcgagattgcagacttgggaatcaaagcagctcgcctgatcatgtcttcaccggacccattacgcgcgctgcaagagctatcgcagaacttcccttcgcatgcggccgcactagccagctcgaccaagttcgacgatggcgatgcctctgcagcgcttttcgaagcagtgctggggctgagcagcatgcgtatcgagccaggtgcttcggatctttggttgaacggtaaaaggaccccggcgaaggagttcatgccgttgacgctcctcgagaccctgaagcaggagcgaaattggtctcatgctctgcagcatcgccttgcgggaggtgggctcaatgtgactgaagcaggcgatctcattgcgtctagtcttgtgggccgtgcattcttggctcaggcagaaggtgaaggtgcagcggcgatctttgatgctagtgatcgcatcgagctcaagaacgctccggagggtactgtgcagggtgcgatcacttggctgaacgatttggagacggacgaagcgaccaaagcttggtcaagcgacctgatggacttgttgcgtcctatgtggcctggcaagttcccgcgtctgtcgttgaacctgttcaatgtcgtgcttgtgttggatctgagacagagagagagctgcaggttcctttcggacaccgtcattcagagcctcggtcgtgtaggcttgcactggggtcttgttcctggcggcctggaagatgatgcgaacagcgactcgatccgtatggctcgtctattctggttcctgcttgaagaagccagcccgcaagtcctatccgatgtgttgcgcaagactgcggccagccgcgctggcacagctgacactctcgacgtttcactcgccatcaaagaagccaagttcgctctcaaagcagtcgactctgatgaaacactttcctcaaagctggacagcattcttgccggccaagacccagcctacaccgtgcgtgaggaactcagcaaggcatacatcaaccgtctgcgagcaacgcgacaagaaagccctacaggccatgtcttcgtgaatggtcagcaccagcctttccatccccaaatcgtgcacattctacaccagtcgattcaagagcagattcagttactcgctccacagatctactacggacaactcagcagcttaagcccagggctcagcacgttcttctacgattcggttggagcgctgagcttccgatctgcgcttgtgcccggtgcaggttcggctgcagacggtgaagaggagggagtgaggcatgaggctgtagatctgttctctgttcttgtggatgatgatgtgccatcagcaacttctgaagggttgttcaacttcttctacccgtcgtctggaagtagcagctcagagggagaggagaagcccgctgcgctgctcaactccaccgtgtgggtgctagctgatctggacagtcaaggcggcctagacctgctaacaaggacctttgaagcgcttgcaaaggaggatgccaagttccgacttggtgttgtccacgctccatcgccagcgtcacaacgttccaatcgcgaggttgcgatctcaacagccttccaccgctttctgaccgactcacaatcatcgcgtccttctccagcactcatacacgacgctttgcgccagccagaacagctgaggagtgccctgggactctcacagagctcaatagactctgaccaagcggctttccgcttctggaacagtatcgcacttcccatcaccgccaagcttgaccttgccactccagcactcattgtagacggtcacctggtgtccaacttcgactcatccaccgtcgaggcccgcgacataacggcacttgtcgaatacgaagcagaccagaaacttccttacatcacccaagccctcactcttctccgcgaagacgtcgactcggtggacccagttcagcgacagaacctcgtctttgcctcgctatctgtcatgaacggcgtctacgattctcgtcggcagaatgccttctccagcaagctcgcctcgcggtcgggactacccgagcaactcggtaccgcagatcacatttttgaagtcggcgacaaagcgaacgccgatattaggatcacgctgttgctcaacccgctgtcggagtctgctcagcgatggtcgagtatcctactcatgctcagggaattggagggggtgtatttgcgagtgatcctgaatccagagatcaagttgcgcgagctacctctgaagcgattctacagattcagtgcgccgcacaggttgcagttcgacctagcaggcaaggtgttgtcggaagagctgcaattctttaatatgccagaggaagcggttctgacgatgggattggacgcaccagcgccttggttgacaatgcctgtggaagcggtttacgatttggataatattcggcttagtgatgtgccgtccagttcgcgcgggaagggcgtgaaggcggtctacgagctcaagcatattcttattgagggtcatgcaagggagaagtccgctaacagcctgcaggtaggcgttccaagaggattgcagctcttgttggagacaccggatggaagtacgagtctggacacgatcgtgatggcgaacctggcttacttccaattcaaagctcaacctggactgtggaagttgagaatccgagctggtcgaagtgacgaactgtacgagatgcagagtgttggtagtgccggttgggacagtccttctgtcggggtaaagggagatctggtcacgttggacacgttttctggactcactatctatcctcgtgtgtcaaagcgcaagggtaaagagaccgagcagctgcttgaggagcttgatgctcaaggacgacctgtcaaaaagactcgcactgcatcccaatccaccgtggatggagtagctgtgagtgcgagcaacttcctctcctcggccaaagacaagatcacctcgcttgccaatcaaatcacctcttccaacccaggtgcaagcaatgctgtggcaacacgcaaacacgccgatatcaacatcttcaccgttgcctctggtcacctttatgaacgaatgacgtacatcatgatcctttccgttctcaaacataccaacagcagcgtcaaattctggttcattgaaaacttcctctccccctccttcaaagagttcattccccatttcgccaaagagtacggattcgaatacgaacttgtcacctatgcatggccgcactggttacgagcacagcgcgagaagcagcgaaccatctggggctacaaaatccttttcctcgatactctgttcccattggatcttagcaaagtcattttcgttgatgcagaccaagttgttcgcactgacctgaaagagctcgttgacctcgatctccaaggcaaagtctacggctaccctccgatgggagacgattcagaagacatggacgggttcaggttctggaaacaaggttattggaaagactaccttcgtgggcgaccttaccacatttctgcgctctacgtcgtcgatctgaaccgtttccgccttttcgctgctggagatcgcttacgaggtcaataccaagcattatctgcagaccccaactccctcagcaacttggatcaggatctaccaaacaacatgcaagccagcctacccatctttacgctggataaagaatggttgtggtgcgaaacttggtgttcgaatgattggttggataaggctaagacgattgatttgtgttcgaatccgaaaacgaaggagccgaaattgaatagggcaaagagacaaattcctgaatggacggtttatgatcaggaggtcgcgagattggcacaaagattggtggaggagaaggtggtgggaaagagcgtggttgcgcctgagagtcagatggagaagaagcaaccacaggaagcgagtggattgatggctaacgatgatggtacgcctgtccacgacgagctttga

SEQ ID NO: 69 - protein, 1468 aa, Verticillium alfalfae
MTRLCRSPLGLVAILWAAVNVSAGPSVNVHMQAAFPAGPYLLELLETAAGENATSYFPLLDRIASGHFKDSSTHKALYDDFLQLLQDEGHVSSPDALSTFKLALSMRLSAPRIEAHYQYYDTAIAPHVTGGKQQDCEIWLQFAGSQYCSPTLEKPEMRVSSIVKLLPFDRVIGTGTDAVLYADPASSAFGAFHQALAQKARNGEISYRLRYRRAVGAPQEPLPVNGYGVELALKRTDYIVIDDREAQTDGPQKSIATEVVLDEEEEVEDLKPLSTSDLAPLGLKAASFITQSQDPWDALLKLTQDFPKFSSSLATHEVSEDFLAEHDKNRAEMAPSGLNALWMNGVQLTERQIEAFTLIDMLRRERKLIGNIRNLGLTGQQAALLLGHPKVASAKNDDEPPRFDWRDEIEEGKVIIWLNDLEKDARYEDLPSELTSLLQRTYPGQLPSIRRNIFTLVVPVDLTNPGDVTVISNLFTFVERLLPVRFGLVPLTPSDDKAAQAKVVYHLMQNYGPEAMIAYLQQSVEDAKIFNPDQIIFDRVVAESVALPGASTASFDDVMQSEEQAERIKLAQHWVKRLNAGTTIPPFFLDGLLLPRDKGWLRTMSMKIGGDLQTIQQGIYMGLIEEDEWVPGRFLKGALSRRNSYIYPEDEKSIQILDVNKIYAEHDNLFSAVPVIQGYAEATKETWAALTIISDLATQAGRDLLFAALRFQRANPGIRLDIVHNSASSTTGPLINAALRKEESALTEVETPEQLKAILDAAETGSEGDYMIALAPFLSAATIAPGANALILNGRVIGPITEDLPFDEDDFQLFLEFEQTARILPVYAALEDLSLGDRLSGPLAAAKLTSITALSTISDVPEGIFESASTVRVNAFDAWDSKYTAIEVGNAETASIHLIGLLNPVSEQGQRWAPILKVLSELDGVYVKLFLNPKEEISELPVKRFFRYVLDSAPSFDESGKVRALGATFKGLPSEALLTTGMDIPPSWLVAPKVCVHDPDNIKLSSTKGDVNVIYQLENILIEGHSREGKAGQPPRGAQVVLGTEKEPLLADTIIMANLGYFQFKANPGFYNINLKDGKTTEIYTVESIGAQGWAPVPGDEGTEVALMDFQGTTLYPRLKRKPGQEKADVLQEDEAVEDGGIISQGLKFAESLLGGSTKSLSAQEHADINIFSVASGHLYERMLNIMMVSVMKNTKHTVKFWFIEQFLSPSFKDFIPHLAEEYGFKYEMVTFKWPHWLRQQKEKQREIWGYKILFLDVLFPLSLDKVIFVDADQIVRTDMMDLVNHPLEGKPYGFTPMCDSRTEMEGFRFWKQGYWANYLRGQPYHISALYVVDLRRFRDLAAGDRLRQQYHALSADPNSLANLDQDLPNHMQFNIPIHSLPQEWLWCETWCSDESQAEARTIDLCNNPQTKEPKLDRARRQVPEWTVYDDEIAAVDRRRRGVPEEVVEKNPKSRTWEEPKSTGKDEL

SEQ ID NO: 70 - DNA, 4407 bp, Verticillium alfalfae
atgacacgtctctgtcggtcgccattggggctggttgccatcctttgggcagccgtcaacgtctcggccgggccttcggtcaatgtgcacatgcaggcggcctttccggctggtccctacctcctggaacttttggagactgctgctggcgagaatgctacgtcctacttcccactactcgaccgcattgctagcgggcacttcaaggattcatctacccacaaggcgctgtacgacgactttcttcagcttctacaggatgaaggccatgtcagcagccctgatgccttatcaaccttcaagctcgcgctatccatgaggttatcggcaccacgaatcgaagcccattatcagtattacgacaccgctatcgcgccacatgtaaccgggggaaagcagcaggactgtgaaatctggctccagttcgcggggtcccaatactgctctcctacactggagaaacctgaaatgagggtttccagtatcgtcaaattgcttcctttcgatcgcgtgataggaacaggcaccgacgctgttctttacgcagatcctgcgtcaagtgcatttggtgcttttcatcaggcactagcgcaaaaagcacggaacggcgagatctcataccggcttcgctatcgcagagctgtgggcgccccgcaagagccactacccgtcaatggttatggcgttgagcttgccttgaagaggactgattacattgttatcgatgatcgtgaggctcaaacggatggcccgcagaagtccatcgccacagaggtcgtccttgatgaggaggaggaagtcgaagacctcaaacctctttcaacatctgacctggcgccgctgggtctcaaggctgcgtctttcatcactcaaagccaagatccctgggatgctttgctcaaactgacacaagactttcccaaattctcttcgtcgcttgctacccacgaagtgtctgaggacttcctcgctgagcatgacaagaaccgcgctgaaatggcacccagcggcctgaatgctctgtggatgaatggcgtgcagcttactgagcgccaaattgaagcattcactttgatcgatatgcttcgtcgagaaagaaagttgattggcaacattcgaaatcttggactgaccggccagcaagctgctttgctcttgggacatcccaaagttgcctcggcgaagaacgacgatgagccgccgagatttgattggcgtgacgaaatcgaagagggcaaggtcatcatttggctcaacgacctcgagaaggatgcccgctacgaagacctgccctctgaattaacttcgctgcttcaacgcacataccctggccaattgccttcgattcgccgcaacatatttaccctcgttgttccggtcgatttgaccaaccctggggatgtgactgtcatcagcaatcttttcactttcgtggaacgtctgctcccggtccgcttcggcttggttcctttgacacccagtgatgacaaggccgctcaggccaaggttgtgtatcacttgatgcaaaactatggtcccgaggccatgatagcctacctccaacagtccgtcgaagacgcgaaaatcttcaatcctgaccagatcatctttgatcgagttgtggccgagtccgtcgctcttcccggggcatctactgcttccttcgatgacgttatgcagtccgaggagcaagcagaacgcatcaagcttgctcaacactgggtcaagcgcctcaacgctgggacaacaattccaccatttttcttggacggcttgctgcttcctcgagacaaggggtggcttaggacgatgagcatgaaaatcggcggggaccttcaaacaattcagcaaggtatctacatgggcctgattgaagaagacgagtgggttcccggccgctttctcaagggcgctctcagtcgtcgtaacagctacatctatcctgaggatgagaagtccatccaaatccttgatgtcaataagatatatgcggaacacgacaatctcttttctgcggtacctgtcatccagggctatgctgaggccaccaaggaaacatgggcagccctgacaatcatcagcgacctcgcaacgcaggccggaagggacttgctgttcgcggcgctgcgatttcagcgtgccaatcccggcattcgtcttgacattgtgcacaattcagcctcgtctacgaccgggccactcatcaatgccgctctgagaaaggaggagagcgctttgactgaagtagagaccccagagcagctgaaggccatactcgatgcagctgagactgggtctgagggggactatatgatcgccctcgcaccattcttgtcagccgccaccatcgcacctggggctaacgcactcattctcaacggtcgagtcatcggtccgataaccgaggaccttcctttcgatgaggatgacttccagctatttcttgaattcgagcaaacagcacgaatcctccctgtgtatgccgcactcgaggatctcagcctgggggatcgtctatctggaccccttgcggctgccaagctgacatctatcacggcactttcaaccatctcggatgtgcctgagggcattttcgagtcggcctctactgtgcgtgtaaatgcatttgatgcttgggattcgaaatacactgcaattgaggtcggaaacgcggaaaccgcaagcattcatttgatcggtcttctgaaccccgtcagcgagcagggtcagcggtgggctccgatcctcaaggttctctctgagcttgatggcgtctatgtcaagctgttcctcaatcctaaagaggagatcagcgagctgccagtgaagcgattcttccgttacgtcctcgactccgcgccgagctttgacgagtcgggtaaggttcgcgccctaggtgccacgttcaagggtcttccgagtgaggctctgcttacgaccggcatggacatccctccttcgtggctcgtggctcctaaggtctgtgttcacgacccggacaacatcaagctgagctctaccaagggcgatgtgaacgtcatctatcaactcgaaaacattctcatcgagggtcactctcgcgaaggcaaagctggccagcctcctcgaggtgctcaagtagtcctcggcacggaaaaggagccgctcttagccgacaccatcatcatggcgaacctgggatacttccaattcaaggccaatcccggcttctacaatatcaacttaaaggatggcaaaacaactgagatttacaccgttgaaagcataggcgcgcaaggctgggcgccggtgcctggcgatgagggcaccgaggttgcgctgatggacttccagggcaccacactctacccccgcttgaagcgcaagcctggccaggagaaggccgatgtgctgcaagaagacgaggcagtggaggatgggggtattatctcccaaggtctcaaattcgccgaaagcctactcggcggttccaccaaatccctctcggcgcaggaacatgccgacatcaacatattctccgtggccagcggtcatttatacgagcgcatgttgaacatcatgatggttagtgtcatgaagaacacaaagcacacggtgaagttctggttcatcgagcagttcctatcgccctcattcaaggatttcatccctcacttggcagaagagtacggcttcaagtacgaaatggtcacgttcaagtggccacactggctacgccagcagaaagagaagcagcgcgagatctggggctacaagattctcttcctcgacgtcttgttcccgctgtcgctcgacaaggttatctttgttgatgccgaccagattgtgcgcactgacatgatggacctcgtcaatcacccgctcgagggcaagccctacggcttcacgcccatgtgcgactcgcgcaccgagatggaaggcttccgcttctggaagcagggctactgggccaactatctccgcggccaaccctatcacatctcggcgctctacgtcgtcgacctccgccgcttccgcgacctcgccgccggcgaccgcctgcgccagcagtaccacgctctcagcgccgacccgaacagcctggcgaacctggaccaggatctgccgaaccacatgcagttcaacattcccatccacagcctgccgcaggagtggctgtggtgcgagacgtggtgcagcgatgagagccaggccgaggcgaggacgatcgatctgtgcaacaacccgcagacgaaggagcccaagctcgaccgcgccaggaggcaggtgcccgagtggaccgtctatgacgacgagattgccgcggtggaccgcaggaggaggggcgtgccggaggaggtcgtcgagaagaaccccaagagccgcacctgggaggagcctaagagcacaggcaaggatgagctgtag

SEQ ID NO: 71 - protein, 1438 aa, Verticillium dahliae
TLLCRSPLGLVAIFWAAVNVSAGPSVNVHMQAAFPAGPYLLELLETAAGENATSYFPILDRIASGHFKDSSTHKALYDDFLQLLQDDNHINSPDALSTFKLALSMRLSAPRIEAHYQYYDTAVATHVTGGKQQDCEIWLQFAGSQYCSPTLENPEARVSSIVKLLPFDRVIGTGTDVALYADPASSAFGAFHQALAQKARNGEISYRLRYRRAVGALQEPLPVNGYGVELALKRTDYIVIDDREAQTDGPQKSIATEVVLDKEEEVADLKPLSTSDLAPLGLKAASFITQSQDPWDALLKLTQDFPKFSSSLATHEVSEDFLAEHDKNRAAMAPSGLNALWMNGVQLTERQIEAFTLIDMLRRERRLIDNIRNLGLTGQQAALLLGHPKVASAKNDDEPPRFDWRDEIEEGKVIIWLNDLEKDARYKDLPSELTSLLQRTYPGQLPSIRRNIFTLVVPVDLTSPEDVTVISNLFTFVERRLPVRFGLVPLTPSDDKVAQAKAVYHLMQNYGPEAMVAYLQQSVEDAKISRPDQIVFDRVVAESVALPEASTASFDDVMQSEEQAERIKLAQHWVKRLNAGTTIPPFFLDGLLLPRDKGWLRTMSMKIGGDLQTISASRRNSYIFPEDEKSIQILDVNKIYAEHDNLFSAVPVIQGYAEATKETWAALTIVGDLTTQARKGLARANPGIRLDIVHNSASTTTGPLINAALRKEESALTEVETPEQLKAILDAAETGSDGDYTIALASFLSAATIAPGANALILNGRVIGPITEDLPFDEDDFQLFLESEQTARILPVYAALEDLSLADRLSGPLAAAKLTSITALSTISDVPEGIFESASTVRVNSFEAWDSKHTAIEVGNAETASIHLTGLLNPVSEQGQRWAPILKVLSELDGVHVKLFLNPKEEISELPVKRFFRYVLDSAPSFDESGKVRALGATFKGLPSEALLTTGMDIPPSWLVAPKVCVHDPDNIKLSSIKGDVNVIYQLENILIEGHSREGKAGQPPRGAQVVLGTEKEPLLADTIIMANLGYFQFKANPGFYNINLKDGKTTEIYTIESIGAQGWAPVPGDEGTEVALMDFQGTTLYPRLKRKPGQEKADVLQEDEAEEDGGIISQGLKFAESLLGGSTKSLSAQEHADINIFSVASGHLYERMLNIMMVSVMKNTKHTVKFWFIEQFLSPSFKDFIPHLAEEYGFKYEMVTFKWPHWLRQQKEKQREIWGYKILFLDVLFPLSLDKVIFVDADQIVRTDMMDLVNHPLEGDPYGFTPMCDSRTEMEGFRFWKQGYWANYLRGQPYHISALYVVDLRRFRDLAAGDRLRQQYHALSADPNSLANLDQDLPNHMQFTIPIHSLPQEWLWCETWCSDESQAEARTIDLCNNPQTKEPKLDRARRQVPEWTVYDDEIAALDRRRRGVPEEVIEKNPKSRTLEEPKSTGKDEL

SEQ ID NO: 72 - DNA, 4320 bp, Verticillium dahliae
atgacacttctctgtcgatcgccattggggctggttgccatcttttgggcagccgtcaacgtctcggccgggccttcggtcaatgtacacatgcaagcggcctttccggctggtccctacctcctggaacttctggagactgctgctggcgagaatgctacgtcctatttccccatactcgaccgcattgctagcgggcacttcaaggattcatctacccacaaggcgctgtacgacgacttccttcagcttctacaggatgacaaccatatcaacagccctgatgccttgtcaacattcaagctcgcgctatccatgaggttatcggcaccacgtatcgaagcccattatcagtattatgacactgctgtcgcgacacatgtaactggaggaaagcagcaggattgtgaaatctggctccagttcgcggggtcccaatactgctctcctacactggagaaccccgaagcgagggtttccagtatcgttaaattgcttcccttcgaccgcgtgataggaacaggcaccgacgttgctctctatgcagaccctgcgtcaagcgcatttggtgctttccatcaagcattagcgcaaaaagcacggaacggcgagatctcataccggcttcgctatcgcagagctgtgggcgccctgcaagaaccattacccgttaatggttatggcgttgagcttgccttgaagaggactgactacattgttatcgatgatcgtgaggctcaaacggatggcccgcagaagtccatcgccacagaggtcgtccttgataaggaggaggaagtcgcagacctcaaacctctttcaacatctgacttggcaccgttgggtcttaaggctgcctctttcatcacgcaaagccaagatccctgggacgctttgctcaaactgacacaagactttcccaaattctcttcgtcgcttgctacccacgaagtgtctgaggacttcttggctgagcatgacaagaaccgcgctgcaatggcgcccagtggtctgaatgctctgtggatgaatggcgtgcagcttactgagcgccaaattgaggcattcaccttgatcgatatgcttcgtcgagagagaaggctgattgacaacattcggaaccttggactgaccggccagcaagctgctttgcttctgggacatcccaaagttgcctcggcgaagaacgacgatgagccgccgaggtttgattggcgtgacgaaatcgaagagggcaaggtcatcatttggctcaacgaccttgagaaggatgcccgctacaaagacctgccctctgaattaacctcgctgcttcaacgcacataccctggccaattgccttcgattcgccggaacatatttaccctcgttgttccggtcgacttaaccagtcctgaggacgtgactgtcatcagcaatcttttcactttcgtggaacgtcggctcccggtccgcttcggcttggttcctttgacgcccagtgatgacaaggtcgctcaggccaaggccgtgtatcacttgatgcaaaactatggtcccgaggctatggtagcctacctgcaacagtccgttgaagacgcgaaaatctccagacctgaccagatcgtctttgatcgagttgtggccgagtccgtcgctcttcccgaggcatctactgcttccttcgatgacgtgatgcagtccgaggagcaagcggaacgcatcaagcttgctcaacactgggtcaagcgcctcaacgctgggacaacaattccaccgtttttcttggacggcttgctgcttcctcgagacaagggatggctcaggacgatgagcatgaaaatcggcggggaccttcaaacaatttcagcgagtcgtcgtaacagctacatctttcctgaggatgagaagtccatccaaatccttgacgtcaataagatttatgcggaacacgacaatctcttttctgcggtccctgtcattcagggctatgctgaggccaccaaggaaacctgggcagccctgacaatcgttggcgacctcacaacgcaggcccggaagggacttgctcgtgccaatcccggcattcgtcttgacattgtgcacaattcagcctcgactacgaccgggccactcatcaatgccgctctgagaaaggaggagagcgctttgactgaagtagagaccccggagcagctgaaggccatactcgatgcagctgagactgggtctgatggggactatacgatcgccctcgcatcattcttgtcagccgccaccatcgcacctggggccaacgcactcatcctcaacggtcgagtcatcggtccgataactgaggaccttcctttcgatgaggatgacttccagctattccttgaatctgagcaaacagcccgaatcctccctgtgtatgccgcgctggaagatctcagcctggcggatcgtctatctggaccccttgcggctgccaagctgacatccatcacggcactttcgaccatctcggatgtgcctgagggcattttcgagtcggcctctactgtgcgtgtgaattcgtttgaggcttgggattcaaaacacactgcaattgaggtcggaaacgcggagacagcaagcattcatttgaccggtcttctgaaccccgtcagcgagcagggtcagcggtgggctccgattctcaaggttctctctgagcttgatggcgtccatgtcaagctattcctcaaccccaaagaggagattagcgagctgccggtaaagcgattcttccgttacgtcctcgactccgcgccgagctttgacgagtcgggtaaggttcgcgctctaggtgccacattcaagggtcttccgagcgaggctctgctgacgaccggcatggacatccctccttcgtggctcgtggctcccaaggtctgtgttcacgacccggacaacatcaagttgagctctatcaaaggcgatgtgaacgtcatctatcaactcgaaaacattctcatcgagggtcactctcgcgaaggcaaggctggtcagcctcctcgaggtgctcaagtagtcctcggcacggaaaaggagccgctcctagccgacaccatcatcatggcgaacctggggtacttccagttcaaggccaatcccggcttctacaacatcaacctaaaggatggcaaaacaactgagatttacaccattgaaagcataggcgcgcaaggatgggcgccggtgcctggcgatgagggcaccgaggtcgcgctgatggactttcagggcaccacactttacccccgcttaaagcgcaagcctggccaggagaaggccgatgtactgcaagaagacgaggcagaggaggatgggggtattatctcccaaggtctcaaatttgctgaaagcctacttggtggctccaccaaatccctctcggcgcaggaacacgccgacattaacatcttctccgtggccagcggtcatttgtacgagcgcatgttgaacatcatgatggttagtgtcatgaagaacacgaagcacacggtcaagttctggttcatcgagcagttcctatcgccctcgttcaaagatttcatccctcacctagcagaggagtacggcttcaagtacgaaatggtcacgttcaagtggccgcactggctacgccagcagaaggagaagcagcgcgagatctggggctacaagattctcttcctcgacgtcttgttcccgctgtccctcgacaaggtcatctttgtcgatgccgaccagatcgtgcgcactgacatgatggacctcgtcaaccacccgctcgagggcgatccctacggcttcacgcccatgtgcgactcgcgcaccgagatggaaggcttccgcttctggaagcagggctactgggccaactatctccgcggccaaccctaccacatctcggcgctctacgtcgtcgacctccgccgcttccgcgacctcgccgccggcgaccgcctgcgccagcagtaccacgctctcagcgccgacccgaacagcctggcgaacctggaccaggacctgccgaaccacatgcagttcaccattcccatccacagcctgccgcaggagtggctctggtgcgagacatggtgcagcgacgagagccaggccgaggcgaggacgatcgatctgtgcaacaacccgcagacgaaggagcccaagctcgaccgcgccaggaggcaggtgcccgagtggaccgtctacgacgacgagattgccgcgctggaccgcaggaggaggggcgtgcccgaggaggtcatcgagaagaaccccaagagccgcaccttggaggagcctaagagtacaggcaaggatgagctgtag

SEQ ID NO: 73 - protein, 1335 aa, Zygosaccharomyces bailii
MKIYLAFFTVLLYLKAVQCVLLSSIGTSVPESAKIWSIASYLLRNCNENILQSIYPMILQLDDETEDSLGDSLCYTVAKLISDLGEPHLASLMPLYCKWYPMGNQDPHERYTYVPNELYFILNGKKYENPDDVYYLKSGELKKQAQLPDSKMLAPGEVVIGNNREAPIVHFYGCPDEKGVFQEFNRNLFSEATQTGKLRFIWRSTCSLEKTALGPFPVALTTKEQSNLENLPQEILKIPESFDKSKYDLLTPREDEFTNVDLKAAKLIADHYQNNQNFDAAFLYAKDFVNNFPILVSELLSLSGDTDVISKSNDELANKGVDHNLLGLYINGQNWKVSSLNEVTLLDALEAELHKLRQLSFSLSKIDNRVSLLTAKNLINDFARISLPNLQQSQPVKLDLHRIRGFSESVIYFNDIEIDDQYHDLSQDIEKFFEKSKFGEIPEYRHNWSELIFVIDFNNLEDPDTKLALEGLQRAISVITQGYPQRIGLLPLNTGEAESIIKKIYHLRDKDLLLLEDFLKDLPIGRGRISADYQNTPDTAKLLRNLQIDQTSIIINGEIYPFRKNTWHYLVAKTIKKDTGFLKRELSKYIKHDEGKVRPMIDVRGILHLKSSETRHKKYTPDYFADSTYTAMDNTVLDVWNDRLCEYFKGKEYNVLHTITIVDDFNTVQALKRLYNLVHVKFVGIRFRAIHTGILSSTWNKVKDSSSKSSFNSILKSIIKKCSHYEPKYQLDDIVLQSWLPDLTPLFFSAKSFMIINGRFLHFEIDEIPQTKLFEATIKREAQRTLDTLEALEISYPGFSEKKIDSELVESISAILTKMFYQGTDIYHNGPDYSTETSLSRIDLTKILEINNFTIFQNVNHELRPIDLVLIVDPLEERTQKFYSLLEEVKGLSFVNLKIVLYPTKDLKIMPINRIYVQDFKNELGSKLPELSKIFDVEIEAPSNLAITSNQRVIGYVIEVHAFDKDDAVSEGVVDGIGGVCLELVDAKENVVDQTITMKTFGYAQFIAPQLWCQYYVRSCDPQYKVISFSSDARSDYLPVKSFDLKNFNPIKVYVQLEKTAAPVISAERENIINIFTVLKNDIAAEGNYKKMVLSILLSPQRHQQDVKFWILDQPYLSASLKKFIEDVNSDPQLDAKIELIQYKWPSWLRPQRFIARRIDALKILLLDVLFPQTVQKVFYMDPEISQLPDPFKLNEKITTKLPFAMFKMVGHGYWETGYWAKRIGEHNLKFHSVEPMFAINLKKFRDLDGGDKLRIHYQRLSADANSLAKVDQDLINDVQEEVPIRTLSRSTIKYLKTDPHVIEAWLEKKEAGTSLSGDDTELLSESNEVLHDEL

SEQ ID NO: 74 - DNA, 4008 bp, Zygosaccharomyces bailii
atgaagatttatttggctttctttacagtacttctgtacctgaaagctgtacaatgtgtgctactttcttcaatcggtaccagtgtacctgagagcgccaaaatatggtctattgcaagttatcttcttcgaaactgcaatgaaaacatcctgcaaagcatataccctatgatattgcaattggatgatgaaacggaggatagccttggtgatagtttatgttataccgttgcaaagctcatttcagatctgggagagccacatttagcctctttgatgccgctatattgtaaatggtatccaatgggaaaccaagatcctcatgaaagatacacatatgtgccgaatgaactttacttcattttaaatggcaaaaaatacgaaaacccagatgacgtgtattatttgaagtctggagaattaaagaaacaggcacaacttcctgacagcaaaatgcttgcccctggtgaggtggttatcgggaataaccgtgaagcacccatagtgcatttttatggatgcccagatgagaaaggcgtctttcaggaattcaacaggaatctgttttcggaagccacgcaaacgggtaaattaagattcatatggcggtccacttgctctctggagaagacggctcttgggccatttcctgttgcactgactaccaaggaacaaagtaacttagaaaatctgccgcaagaaattttgaagataccagaaagctttgataaatcgaaatatgacctcctcactccacgtgaggatgaatttactaatgttgatctaaaggcagccaaattgattgccgatcactatcaaaacaatcagaattttgacgccgcgtttctatacgcaaaggattttgtcaataactttcccattctcgtttctgagctgctatctttgtcgggtgacacagatgtcatatccaaaagcaatgatgaactggccaacaagggtgtggaccataatttacttggtttgtatatcaacggacaaaactggaaggtatcatcgcttaacgaagtaacgttactcgatgcactagaggcagaacttcacaaattgagacagctttccttctccctttccaagatagataatcgagtctcgctattgactgcaaaaaatctaattaatgactttgcacgcatatcattgcccaatcttcagcaatcgcagccagtgaaactggacctgcacaggatacgcgggttttcagagagtgtgatttactttaacgacattgaaatcgatgaccagtatcatgatttatctcaagacattgagaagttcttcgaaaaatcaaagttcggtgaaattccggagtacagacataattggagtgagctgatatttgttattgattttaataatttagaagacccagatactaaactagcattagaaggtttgcagcgtgcaatttcagttattacccaaggatatccgcaaagaatagggcttttaccactcaacacaggcgaagcagagagtattatcaaaaaaatctatcatttacgagacaaggatctcttacttttggaagactttttaaaggatttgccaattggcagaggtagaataagtgcagactatcaaaatacaccagataccgctaaacttctgagaaaccttcaaattgatcaaacatcaattatcattaatggtgaaatctatccattcaggaagaatacctggcattatttggtcgcaaaaacgatcaaaaaagatacgggttttttgaaaagagaacttagcaaatatatcaaacacgatgaaggaaaagtaaggcctatgatagatgtaagaggcattcttcacttgaaatcttccgaaacaaggcataaaaagtatactcctgactattttgccgactctacttatacagctatggataacacggttttagatgtctggaatgacaggttatgtgaatatttcaagggtaaagagtacaatgttttgcacaccataacaattgtggatgattttaatactgtgcaagcactaaaaagactatacaatttggtccatgtgaagtttgtaggaatcaggttcagggcaattcatacagggatcctttcctcgacttggaacaaggtaaaggatagttcttcaaaatcatcctttaactcaattttgaaatcaataattaaaaagtgttcccactatgaaccaaaatatcagttagatgacatcgtcctacaaagttggctgccagacctaactcctctatttttttctgccaaatcgtttatgataatcaatgggaggtttttacattttgaaattgatgagattcctcagaccaaactttttgaggcaactatcaagagagaagctcaaagaactttggatactttggaggcacttgaaatttcgtatcccggattttcggaaaaaaaaatcgatagtgaacttgtggagtcaatttctgcaattttgactaaaatgttttaccaagggaccgatatataccacaatggccccgactatagcacagagacctccttgtcaaggattgatttgacaaaaatattagaaattaataatttcactatttttcaaaatgtcaatcatgagcttcggcccatcgatctggtgttgatcgtagatccactagaggagagaacccaaaaattctactctttacttgaagaagtcaaaggtttatctttcgtgaatcttaaaatcgtgctttacccgacaaaagatttgaaaattatgcctatcaatagaatatatgttcaagattttaagaacgaactaggtagtaaactaccagagctatcgaaaatttttgatgtggaaattgaagctccaagtaatttggcaatcacctcgaatcaacgtgtaatcggctatgttattgaagttcatgcctttgataaagatgatgcagtaagcgagggagttgttgatggcataggaggtgtgtgtttagaattggtggatgcgaaggaaaatgtggttgatcaaacgataacaatgaaaactttcggctatgctcagtttattgctccgcaattgtggtgtcaatactatgtgagaagctgtgacccacaatacaaagtaatttcgttttcctcggatgctcgttctgattacctacctgtcaagtcttttgaccttaagaattttaacccgataaaagtttacgtccaactggaaaagacagcagcaccagttataagtgcggagagggaaaacattatcaacatctttactgtgctgaaaaatgatatcgcagctgagggaaactataaaaaaatggtactttctattttgctaagtcctcaaagacaccagcaagacgttaaattttggatccttgatcaaccgtaccttagtgcttctttgaaaaaatttattgaagacgtgaattctgacccccagctagacgcaaaaattgaacttattcagtataaatggccttcgtggctgagaccccagagatttattgcaagaaggattgacgccctcaaaatcctcttgctcgacgtattgttcccacaaaccgtgcaaaaggttttttacatggaccctgaaatttcgcagctacccgatcccttcaaactgaacgagaagataacaaccaaactgccctttgccatgtttaaaatggttggtcacggatattgggaaactggctattgggcaaaacggatcggggagcacaacctaaaatttcattccgtcgaaccgatgtttgctattaacctgaagaaattccgcgatcttgacggtggggacaagttgcggattcattatcagagattatccgcggatgccaactcacttgctaaagttgatcaagatttgattaatgacgttcaagaagaggtacccatacggacgctcagtcgctcaacaattaaatacttgaaaacagatccacacgtcattgaagcatggttagaaaaaaaagaggcgggaaccagtctctcaggtgatgacaccgaattactgtctgagtcgaacgaagttctacatgacgaactctga

SEQ ID NO: 75 - protein, 1349 aa, Zygosaccharomyces rouxii
MKLITAGIVFLTVLKTVVCLSVSLQSASVSERFKIWTIAQHLFRGDKKGILATVYPLVMQLDEDLEDTPVANLCEVVSARLSELGELDLASLMPLYCQWYPMGLPFPSSYDHLKSETYFVLNNKRYDHSDDVFYLKSGELKKQAQMPDEAVVAVNDVIIGNNPEAPIVYFYGCPDDDEATFEEFNRNLYSEATETGKLRFIWRSTCHVRNDTEIGPFPVELSIRDGKSNIDVLPIDHLGVPHQFDKSKYGLINPTTNQLSDLDLKVAHLIAQKYNSSKDFNSTLDYARGIINNFPLLVPELITMKNNTEAIMDSNTNLTESGVDHKLLGLFINGENWRFSSLDQYTLLNALESEYRRLKQLLSGLVKMYSKSTLVTAKDLITKFSQISIPNLQQSQPIKVDLHRISGFSESVIYFNDIEIDDQYRELTTDINKFFEKSKFGEIPEYRHNWNELIFVIDFNNLEDPDTKLALDGLKRAIGVITQGYPQRIGLLPLNTGASDDIIRKIYELKDRDLLELEDFLGNELIRGRTISSDYTNTPGVAKLLRNLQINETSIIINGEIYPFRKNTWHYLIAKTIKKDVGYLKRELRKYIRHDGEKAQPIIDVRGVLHMKSSETRHMKYTPDYFADSTYTTLDNSALQVWDERILEYVKGKEYNLLHTITLVDDFNTLQALKRLHNLIGIKFVGVKFRIIHSGALESNWKILKKISSKPSFLKELKSLIKKSARVISTNELNRNVLQSWLVDLKPEFLSAKSFMLINGRFIHFEENEIPQIKLFETTIKREAQRTIDALEALETILPGVTSNKIDPEFMENISATLTKMFYQGTELYGNGPVFTTESTLSRFDMSEILQVNNFTIFESSNDGDKPIDVVLVIDPLEERSQRLLSLITDIQQLPFLNVKIVIYPTADLKFMPIDRIYVPNFPDELGGKLTDIESKFDVAVEVPRNFVLNDNKNVGGYLVEVHAFDERQPVSEGIIDGLGNVCLELVDSTGKSVDKTVTMMTFGYGQFIVPKLGSNFTIKSCDPRYKVVSFSSDARADYMPMESVNVTSLNPVVTYVKLQKVDEVAKITVEESVINIFTIPKNEHSFEQEYQKMVLHILHSPQHGYMGVKFWLLDQPFISQSLRKFIDVINLDPKLDGNIELVKYEWPPWLRPQRFLERRMDAYKILFLDLLFPQSVSRIIYMDPSISQLPDPFKLNEKVKTKLPFAMYKMVGHGYWETHYWAQRLGDRNLKFHSVHPAFVVNLQQLREYNGGNKLRIHYQRLSADVLSLAKIDQDLINDAQEEVPIRTLSSSTIVFLNTKNQNSVNAWLTNFQKLAAKEETAGFATDENPGIKQEGTRETIDLMHDEL

SEQ ID NO: 76 - DNA, 4050 bp, Zygosaccharomyces rouxii
atgaagttgataacggcgggaattgtctttttgacagtgctcaaaactgtagtatgcctgtcagtttctttacagtccgctagtgtttctgagaggtttaaaatatggacgattgctcaacacctatttcgaggtgataaaaaaggtatcctggcaacagtatacccactagtaatgcagttggatgaggacttagaggatacacctgttgcgaatctttgtgaagtggttagtgctcgtttgtccgaactgggggagctagacttagcctcgttgatgccgctgtattgtcaatggtacccaatgggacttccttttcccagtagctacgaccatttaaagagtgaaacatattttgtgttgaataataaaaggtatgaccactctgacgatgtattctacttgaaatctggagagttgaagaaacaggcccagatgccagatgaggcagtggtggcggttaacgacgtgatcattggcaataatccagaggcccctatagtgtatttctatggatgcccagatgatgacgaagccacttttgaagaattcaacagaaatttgtattctgaagctacggagaccggtaaactgagatttatatggaggtctacctgccatgtaaggaatgatacagagattgggcccttcccagtggaactgagtattcgcgatgggaaaagtaatattgatgttttaccgatagatcatctaggggttcctcatcaatttgacaaatcgaaatatggcctaattaaccctacaacgaatcagttaagcgatcttgatctaaaagtggctcacttaattgcacagaagtacaactccagcaaagactttaactctacgctggactatgcaagagggattatcaacaattttccgctgttggttcctgaattaatcaccatgaagaacaatacagaggctattatggacagtaatacaaatctgaccgaatctggtgtggatcataaattgcttggacttttcatcaacggtgaaaattggagattctcctcacttgaccaatatacattgcttaatgccctagaatcagagtatcgcagattgaaacagctattatcgggtctggttaaaatgtactcaaaatcaactttggtaactgccaaagatctcataacaaagttttcacaaatctctatccccaatttacagcaatcgcaacctatcaaggtagatctgcatagaatttccgggttctctgaaagtgtcatatatttcaacgatatcgaaatagacgaccagtacagagaactcacaactgatattaacaaattctttgaaaaatctaaatttggtgaaataccggaatatagacacaactggaacgagttgatcttcgtgatcgatttcaacaatttggaagatccggatactaaattagctctagatggtctcaaacgtgcaattggtgttatcactcaaggttacccccaaagaataggattattgccgctcaacaccggagcttctgatgacattattagaaaaatctacgaattgaaagacagagatttgttggaattagaagatttcttgggaaatgaattaattagaggtcgtacaatttcctctgattataccaatacaccaggagttgctaaacttctaagaaaccttcaaattaatgaaacatcgattattatcaatggggaaatctatcctttcagaaaaaacacttggcattatttaattgctaagactatcaagaaagatgtaggctacttaaaaagagagttgagaaagtacattaggcacgatggcgaaaaggcgcaaccgatcatagacgtgagaggggttctacatatgaagtcttccgaaactagacatatgaaatacacgccggattattttgcagattctacttacactacgttggataactcggctttacaagtatgggatgaaagaattttagaatatgttaaaggcaaggaatacaacctgttgcatactatcactcttgtggatgactttaacactttacaggcgttaaaaaggttacacaatttaattggaataaagtttgttggtgttaagttcaggataatccattctggagcacttgaatccaattggaagattttaaagaagatctcatctaaaccatctttccttaaagagttgaaatcgttgatcaagaaatctgctcgtgtaatctccaccaatgagttaaatcgaaatgttctacaaagctggctagtcgacttgaaacctgagtttctttccgccaagtcctttatgctaattaacggaagatttattcatttcgaggaaaatgaaatcccacaaatcaaattgtttgaaacaactattaaaagagaagctcaacgaaccattgatgccttggaagcattagaaacaattctacctggggtaacaagcaacaaaatcgatccggaattcatggaaaacatttctgcaactctaacaaaaatgttctatcaggggacagagctttatggaaatggtccagtattcacgaccgaaagcacgctctcaagatttgacatgtctgaaattttacaggtaaacaattttaccatttttgaaagcagcaatgacggagacaaacctattgatgttgttctcgtcatagatccactagaggaaaggtcccaaagacttctttccctaatcactgacatacaacagctgccttttctcaatgtaaaaattgtcatttaccctactgcagatctcaaatttatgcctattgacagaatttatgtgcccaatttcccggatgaacttggcggcaaattaactgatattgaatctaaattcgatgtggcagtggaggtcccgcgaaattttgtgttgaatgataataagaacgttggtggatacttagttgaagttcatgccttcgatgagagacagccagtaagtgaaggaataatcgatggtttgggaaacgtatgcctagagctagttgatagtaccggaaaatccgtagataaaaccgttactatgatgacatttggatatggtcaatttatagttcccaaactaggttccaatttcacaatcaagagttgtgatcctcggtacaaggtagtttccttctcttcagatgctcgtgccgattacatgccaatggaatctgtaaatgtcacaagtttaaatccagtggtgacatatgtaaaattgcaaaaggtagatgaagtggccaaaattacagtagaagaaagtgttatcaatattttcactattccaaaaaacgagcattcatttgagcaggagtaccaaaaaatggttttgcacatcctacacagcccacagcatggttatatgggcgtcaaattttggttgttagatcagccatttatttctcaatccttaagaaaatttattgatgtcatcaatttagatccaaaactggatggaaacatcgaacttgtgaaatatgaatggccgccatggttaaggcctcaaaggtttttggaacgaagaatggatgcctacaaaattctatttctcgacctcttattcccacaatcagtttctcgaattatctacatggatccttcaatttcccaactacctgatcctttcaagttaaacgaaaaggtaaagaccaagttaccctttgcaatgtacaaaatggtcggtcacggctactgggaaactcattactgggcccaacgtcttggcgatcgaaatttgaaattccattctgtgcatccggcatttgtggtcaatctacaacaattgcgtgaatataatggcggtaacaaattaagaattcattaccaaaggttatctgcagacgtactttccctcgcaaaaattgatcaggatctaattaacgacgctcaagaagaagtaccaatccgcaccttaagcagttctacaatagtatttctgaatacgaagaaccaaaattcggttaacgcctggctaacgaactttcaaaaactagcagctaaagaggagaccgctggtttcgctactgatgaaaatccggggattaaacaagaaggtactagagaaacaatagatctcatgcacgatgagttgtga

SEQ ID NO: 77 - protein, 1436 aa, Alternaria solani
MRAPASILSAKALLVLSAFRHIGAHAGPSVNVALRASFNPAPYLVELLETAAEENATAYFPILDRISEGYFDEKNTQQELYTAFRDLLQSDGHITDPAALASFELALSVQSAAPRIEAHYQFYKTSVTYQLPFDRILGNSSALPAILYADITAPRFKKWHKTLSRTARDGKTSYRVRHKPSSGAPTTPLIVNGYGVELQLKRTDYIVIDDRQAEQGQKSDAQKPIGTGLDDDEDVADLKPLSKDEVSELALKAADFVTQSEQPMDTLMKLVQDFPKYSSIIAAHNASDEFVEEHLANRNQLLPAGYNVIWINGVQIPARDVNPYSLLAHLRRERKLINGIRSQGLSGSEVVSLLSHTSIAESQTEDEPQRYDFRDTTEGGNVILWLNDIENDPMLLQRTYPGQLPSCRRDIHNAIVSVDLTSTEDVSTVLETIMSLIRRGIPLRWGLVPQTATSGALEQAKLVYHLQDAYGLSAVIEYLQVSAAKPDKAVFDTTVKRTTLLEGKEALSFDDVLKSEALEQRITGAKQYLNRLAADGPKAPIFVNGVPIPATDGWLQALSQRIGMDLRQVQQAVFNGVFNDESWVPQHFLFQAAAKRNPLVIPENEKNITLINMAGFEELHGAAYSKMPRIHASESASKSDWIHITLVADFDSEAGFALLKVLADFHEANPNVEAVLIHNPKAGAEQSNASEDLLEAYIKSGRKLTSEALSELLGKEANYGPTPANSASFWKVAEPIYDALGLKPGQNGLLLNGRYVGPIPEDYTFTQDDMETFVTYETTKRIEPLNKALTDLQLMDKIVSPLDVAKIQSLVALSTVSDVPEGIFETASTLRMTTYNNWTAKHTAIVRGDEDKAVFQIVASIDPATEQAQKWVPILKVLSDMNGVHLKLFLNPKPMLQELPVKRFYRYVLEARPQFTRGGSVVQLGAHFSGIPKEALLNLGMDVPPSWLVAPEESIHDLDNIKLSTIPAGTNIDAIYGLESILIEGHSRDTTNGGQPPRGAEVVLATERDPHFADTIIMANLGYFQFKANPGFYNIKLKSGRSQEVFNLDSAGPISWAPQPGDETTEIALMSFQGATIFPRLSRKPGHEDTDVLAPEESLASELVGKSAQKVNKFLGKMGLNFDSEKVLQKGAELFSGGKATKKGTQADINIFSVASGHLYERMLNIMMVSVMKHTNHTVKFWFIEQFLSPSFKSFLPHMAAEYGFEYEMVTYKWPHWLRGQTEKQREIWGYKILFLDVLFPLDLEKVIFVDADQIVRTDMYELVQHDLEGAPYGFTPMGDSRTEMEGFRFWKTGYWANFLRGRPYHISALYVVDLNRFRQLAAGDRLRQQYHSLSADPNSLSNLDQDLPNNMQFNLPIHSLPQEWLWCETWCSDEDLAKAKTIDLCNNPQTKEPKLDRARRQVPEWNVYDEEIAALARRVKGEEMKKVVDVQEEEQ

SEQ ID NO: 78 - DNA, 4309 bp, Alternaria solani
atgcgagctccggcctcgatactgagtgcgaaagctctcctcgtgctcagcgccttccgtcacattggcgcacatgcgggcccaagtgtcaatgtcgctcttcgggcttccttcaaccctgcgccatatctagtagagttacttgagaccgctgcagaagaaaacgcgacagcatactttcccatcctcgaccgcatatccgagggctacttcgacgagaagaacacacagcaggagctgtatacggccttccgagacctcctccagagcgacggacacatcaccgaccccgcggctcttgcctctttcgaactcgccctgtcagtccagtcggctgcgccgcggatagaagcacactaccaattctacaagacctcggtgacataccaactacccttcgatcgcatactcggcaacagctccgctctgcctgccatcctatacgccgacataactgcgccgcgattcaaaaagtggcacaagacactgagcaggacggccagggacggaaagacatcgtaccgtgtccggcataagccttcgtccggcgcgccaacaacaccgctgatagtcaacggatacggtgtcgagttgcagctgaagcggacagactacatcgtcatagacgacaggcaggctgagcagggacagaagagcgatgctcagaagccgataggcactggcttggacgacgacgaagatgtcgcggaccttaagcctttgtccaaggacgaggtatccgaactcgcactgaaagctgccgactttgtgacccagagcgaacagccaatggacacccttatgaagcttgtgcaggactttccaaagtactcgtccatcattgcagctcataacgcgtcggatgagtttgtcgaggaacacttggcgaatcgaaaccaactccttcctgctgggtacaacgtcatatggatcaacggcgtacagatccccgctcgcgacgtgaacccgtattcgctgttggcacatttgcgacgcgagcgaaagttgatcaacgggatacgcagtcaggggctaagcggttctgaggtcgtatctctgttatcgcatacttctatcgccgagagccagacggaagacgagccccaacgttatgacttcagagatactactgaaggaggcaacgtcatcttgtggctgaacgacatcgaaaatgaccccatgctactgcaaagaacctaccctggtcagcttccatcttgccggagagatattcacaacgccatcgtctctgttgaccttacctctaccgaagatgtgtcgactgttctagaaactatcatgagtctgatcaggcgtggcattcccctacgctggggtctcgttcctcagaccgccacatccggggctctagagcaggctaagctagtctatcatctgcaggacgcatacggactgtctgctgtgatcgaatacctacaagtgtcagcggcgaaacccgataaagctgtctttgacacgacagtcaagagaactaccctccttgaagggaaagaagcgctatcattcgacgatgtactgaaatccgaagctttagagcaacgtatcacaggtgccaaacagtacctgaaccgtctagcagcagatggcccgaaagcccccatctttgtcaacggtgttcccattccagccaccgatggatggctccaagctctcagccagagaatcggcatggatctgcgccaggtccagcaggctgtcttcaacggcgtcttcaatgacgaaagttgggttccgcaacacttcttgttccaggccgctgctaagcgcaaccctctggtcatcccggagaatgagaagaacatcacgcttataaacatggcgggatttgaagagcttcatggtgcggcttacagcaagatgccgcgtatccatgcatcagagtctgctagtaagagtgactggatccatatcacgctggtagcggactttgactcggaggctggatttgcgcttcttaaagttctggcagatttccatgaggccaatccaaacgtggaggccgtcctcatacacaacccgaaggctggtgcggagcagtcaaacgcctcggaagatctgttggaagcatacatcaaatctggccgcaagctcaccagcgaagccttgtctgaacttttgggcaaagaggccaattatggaccaactccagccaactcagcctcattctggaaggttgctgagccgatctacgacgctctcggtctgaagccaggacagaacggcttacttctcaatggacgctatgttggacctatcccagaagactacacattcacacaggatgacatggagacttttgtcacttatgagacgaccaagcgcattgagccattgaataaggcgcttaccgatcttcaactcatggacaagattgtatctcctctagatgttgcaaagatacaatcgcttgttgcgctctccactgtatcagacgtcccagagggcatattcgagactgcgtccactttgaggatgaccacatacaacaactggactgctaagcacactgctatcgtcaggggtgacgaagacaaagctgttttccagattgtggcttccatagatccagccactgaacaagcacaaaagtgggtacccattctcaaggtactcagcgacatgaacggcgtacatcttaagcttttcttgaaccccaagccgatgctgcaggaacttcctgtcaagcgtttctacagatacgttctcgaagcccgtccacagttcactcgcggtggatccgtcgtccaactaggagctcactttagcggcatcccaaaggaagccctgctgaacctcggcatggatgtgccaccgtcatggctagtcgctcctgaagagtctatacatgacctcgacaacatcaagcttagcacgatccctgctggtaccaatattgacgccatctacggattggagagcattcttatcgagggccactcccgcgacaccaccaatggtggacagccgccgcgtggtgctgaggttgtccttgccaccgagcgagacccccacttcgccgataccatcatcatggccaaccttggctactttcaattcaaagccaaccctggattctacaacatcaagctcaagagtggtcgctctcaagaagtcttcaaccttgatagtgcaggtcccatcagctgggctcctcagcctggtgacgaaaccactgagattgcgctcatgagcttccagggagcaacaatctttcctcgactttcacgcaaaccaggccatgaagataccgatgtactggctcccgaggaatcactggcttctgagctggtcggaaagagcgcgcagaaggtcaacaagttccttggcaagatgggcctcaacttcgactctgagaaggtcctgcaaaagggcgccgaattgttctctggaggcaaggcgacaaagaagggcactcaggcggacatcaacattttctcggtcgcgtcaggccacctgtacgagcgcatgctcaacattatgatggtgtctgttatgaagcacacgaaccacactgtcaagttttggttcatcgagcagttcctatcaccgagcttcaagtccttcctcccgcacatggctgctgaatacggattcgaatacgagatggtcacatacaagtggcctcattggctccgcggacaaaccgagaagcaacgcgagatctggggctacaagatcctcttcctggatgtcttattccccttggatctcgaaaaggtgattttcgtcgatgcagaccagatcgtccggaccgacatgtatgaactagtgcagcacgatctcgaaggcgcaccctacggctttacacccatgggcgactcacgcacagagatggagggcttccgcttctggaagacaggctactgggcgaacttcttgcgcggccgaccctaccacatctccgcgctctacgtagtagacctcaaccgcttccgccagcttgccgccggtgacagactgcgtcagcaataccactccctctccgccgaccccaactcgctctccaacctggaccaggacctaccaaataacatgcagttcaatctgcccatccacagcttacctcaagaatggctgtggtgcgagacgtggtgcagcgacgaggatctggccaaggcaaagactattgatctttgcaataacccgcagaccaaggagccaaagttggatcgggcgagacggcaggtgccggagtggaatgtgtatgatgaggagattgcggcgttggcgaggagggttaaaggggaggagatgaagaaggtggttgatgtgcaggaggaggagcaga

SEQ ID NO: 79 - protein, 1542 aa, Cercospora beticola
MANRSWGNWKAAALASLLTCSNALPSVNVAVRTAFGAPPFLVELLETAAEENNTAYFPLLDRIADGYFDSSTTDEQLYKAFRSLLESDGHLGREDLSSFDYALAIHSAAPRIEAHYQYYNTSVVPTISKERGCDTWVYVPFSGQKYCSPDLDEKSAESLGQPGDTVKSLPFDRVLGDANSEKPSVLYADLSSESFREFHKTLSKTAKDGKTSYRVRYRAFEGVESKPLTVSGYGVELALKRTDYIVIDDRQDGEDAEKDEGKSAAETKLSEEELSDLRPLSQSELRRLGVRAASFVMGSEDPFATLLKLSQDFPKHSTSIAATNVSQDFIEEHAKNREVLLPPGYNVMWINGVQIMPRDVEAYALLEHLRRERRMIKSVQQIGLSGSEAIELLSHEAITAAQDEQEAPRYDWRDDAEGGDIIIWLNDLEKDKRYADWPATANALLQRTFPGQLPPVRKEVHNLVLPVDFADFNDVLLVSEQLRSFVTRQVPIRMGLAPRIRSETSTEQATIIYYLVHNYGLGTALKYLEQSLEAAGRRYSKPNEKVFQAVKTAGKLRPNKEDLSLSDVLKDKTLSERITRSKDYISRIGSTDSTPPVLINGAPIARTEDWLQVMSQQVSIDLRTVQQAVYTGQLGDEDYLPTLFLSKASFRRNPLVVPEDDSSLRFLNLGDHHEFEDLPSIPADPQTIERELVHLTVVADLDSEQGFEQLMEALLYKKDHDNVEVAVLHVPRDGDSKSRIASDLQKDGAATVLESLITEWDNFWTSSTGGDAPDMNLESRRKIYEILRLAAAQDSTPEIDEEVRSYWAKFNHLITAVGVTPGKKALIANGRVVGPVSDDVPIESSDIETLLTYERTRRLLPAALAIEALGLQQKSSTPVAFARISNLIALSLISDVPEGIFEAAPTVRTDVFKKFESNHTAINIGDLDTATIQIYAAVDPASEAAQKWIPIIKVLSEFDGVHVRLFLNPRDRLEEIPIKRFYRHVLSSKPHFEADGSLAPTGAQFRGLPADALLNMGMDLPPAWLVAPEVTVHDLDNIKLSAVKNDIDATYQLEHILIEGHSRDVTVGPPPRGAQLVLGTDADPHFADTIIMANLGYFQFKANPGIYSLAMQKGRSEEIFHIDSAGASGYDQQGTDNSTEIALMSFKGATLFPRISRNPGMEDEDVLEPSKSALESLADGAGDLLAQVGLGDGAQKFLGKAAKLGSGLLSKSGSATATPERKHADINIFSVASGHLYERMLNIMMVSVMKHTKHSVKFWFIEQFLSPSFKDFLPVMAETYGFEYEMVTYKWPHWLRGQKEKQREIWGYKILFLDVLFPLDLDKVIFVDADQIVRTDMYELVQHDLQGAPYGFTPMCDSRTEMEGFRFWKQGYWKNFLKGLPYHISALYVVDLKRFRQMAAGDRLRQNYHQLSADPNSLSNLDQDLPNHMQSLLPIHSLPQEWLWCETWCSDESLKEAKTIDLCNNPQTKEPKLERARRQVPEWNVYDEEIGGLAKRWKEEKRKGFVDAVVGLEEESMQERLQREDAEREERKKKAEGKRDEL

SEQ ID NO: 80 - DNA, 4629 bp, Cercospora beticola
atggccaacagatcgtggggcaattggaaggcagcagctctggccagcttgctgacctgctccaatgcccttccctccgtcaacgtcgccgtacggacagcctttggtgctccaccgtttctggtagaactgctcgagacagcagccgaagagaacaacacagcctatttccctctcctcgatcgcatcgcagacggctacttcgattcctcgacgaccgacgaacagctatacaaagccttccgatcactcctcgaatcagacggacatctagggagagaggacctctcatccttcgactatgctctcgccatccactccgctgccccacgcatcgaagcccactatcaatactacaacacttccgttgttcccacaatatcgaaagagagaggatgcgatacgtgggtttatgtccctttcagcgggcagaaatactgctctccagacttggacgagaaaagcgcggagagtttgggacaaccaggagatacagtgaagtcattacctttcgatcgtgtgctgggagacgcgaatagcgagaagccgagcgtactgtacgcagatctgtcgagtgagagtttcagggaattccacaagacgttgagtaagacggcgaaggacggcaagacgagttatcgagtgcgttacagagcttttgagggagtggagagtaagcccttgactgtgagcgggtatggtgtggaacttgcattgaagaggacggattacatcgtcattgatgatcgacaagacggcgaagatgcggagaaagacgagggaaagagcgccgcagagacgaagctgagcgaggaagagctctcggatcttcgacctctgtcacaatcggagttgaggagattgggagtgagagctgccagttttgtcatgggaagcgaggatccttttgcgacgctgttgaagttgagccaggatttcccgaagcattcgacgagtattgcggcgacgaacgtttctcaggactttatcgaggagcatgcgaagaatcgagaagtgctgcttccgcctgggtataatgttatgtggatcaatggcgtgcagattatgccgagagatgttgaggcttatgcgcttctggagcatctcagacgggagcggaggatgatcaagagtgtgcagcagattgggctgagtggatctgaggctatcgagctgctctctcacgaggctatcactgcagcgcaggacgagcaagaggcccctcggtacgactggcgagatgacgctgagggaggcgatattatcatctggttgaacgatcttgagaaggataagcggtacgctgattggccagccactgcgaatgcacttctccagcgtacctttcctggccagctcccgccggtccgcaaagaggtgcacaatttggtcttgccggttgactttgcggatttcaacgatgttttgctcgtttctgagcagctacggagttttgttacacgtcaagttcctattcggatgggtctggcaccacggattcgaagcgagactagcacggagcaggcgacaatcatctactacctcgttcacaactatgggcttggtactgcacttaagtacctggaacaatcgctggaggcggctggtcgcaggtatagcaagcccaacgagaaggtgttccaagctgtgaagactgccggcaagcttcgtcccaacaaggaggacctttctctatcggatgtgctgaaggacaagaccttgtctgaaagaatcacaaggagcaaggactatatcagcagaatcggcagcacagattctacacctcctgtgctgatcaatggtgcgccaattgccaggaccgaggattggctgcaggtaatgagccagcaagtcagcattgatcttcgcaccgtgcagcaggctgtctatactggtcagcttggcgacgaggattatctgcccaccctttttctcagtaaagcgagcttcaggcgcaatcccctggttgtgccggaagatgacagcagtctgcgatttctcaaccttggtgatcatcatgagtttgaagatctgcctagtattcctgctgatccgcagactattgaacgagagcttgttcatctgactgtggtggctgatctggacagcgaacaaggatttgagcagcttatggaggctctgctgtataagaaggatcatgacaacgttgaagtagctgtactacacgtccctcgcgacggagactccaagtccagaatcgcttcggacttgcagaaagacggcgcggctactgtgttggagagccttattactgagtgggacaatttctggacctcaagcactggcggagatgctcctgatatgaatctggaatccagacggaagatctatgagatcctgagacttgctgcggcacaggacagcactccggaaatcgacgaggaagttcgcagctactgggctaagttcaatcatctcatcaccgctgtgggggttacacctggcaagaaggcactgatcgcgaacggaagagtggtaggcccagtgtccgatgatgttccgatcgagtcgtcagatattgagactctgctcacatatgagcgtacgagacgattgctgccagcggcacttgcgatcgaggctcttggtcttcagcagaagtcttctacccctgtggcattcgcacgaatctccaatctgattgctctgtcactcatttcggatgtgccagagggcatcttcgaagcagcgccgacggtccgcactgatgtgttcaagaagtttgagtccaaccacacagcgatcaatatcggagatctggacacagcgacgatccaaatctatgctgcggtagacccagcttctgaggcagctcagaagtggatacccatcatcaaggtcttgtcggagttcgatggcgtccatgtgcgtctcttcctgaacccgcgagaccgccttgaagagatcccgatcaagcgcttctatcgacatgtattgagctcgaagccacactttgaagctgatggctctcttgctccgactggtgcacagttccgcggacttcctgcagatgctctactgaacatgggaatggatttgcccccagcttggcttgtggcaccagaggtcactgtgcacgatctggacaacatcaaactgagtgctgtgaagaacgacatcgatgctacttatcaattggagcatattctgatcgaaggtcactctcgtgatgttacggttggaccacctccacggggagcgcaacttgtgctgggcactgatgccgatccgcactttgctgacactattatcatggccaatcttggatacttccagttcaaggcgaatccaggcatttacagtcttgctatgcagaaaggacggagtgaggagatcttccatattgacagtgctggtgcctctggttatgatcagcaaggaaccgacaactcgacagagatcgcgctgatgagcttcaaaggagcgacactgtttcctcggatctctcgcaacccgggtatggaggacgaagatgtgctggagccttccaagtctgccctcgaatcgctcgcagatggtgcaggtgatctcctggctcaggtaggactgggcgatggtgcacagaagttcctcggaaaagcagccaagctcggtagcggcctattgtccaagtctggatccgccactgctaccccagaacgcaagcatgcagatatcaacatcttctccgttgcctcgggtcatttgtatgagcgcatgttgaacatcatgatggtttcagtcatgaaacacaccaagcacagcgtcaagttctggttcatcgaacagttcttgtccccttcattcaaggacttcctcccggtcatggcggagacatacggttttgagtacgaaatggttacttacaagtggccacactggctccgagggcagaaggagaagcaacgtgagatctggggctacaagatcctcttcctcgatgtgctgttcccactcgacttggacaaagtcatctttgtcgatgccgatcaaatcgttcgcaccgacatgtacgaactcgtacaacacgacctgcaaggcgcgccgtacggtttcacacccatgtgtgacagccgaaccgaaatggaagggttccgcttctggaaacaaggctactggaagaacttcctcaaaggcctcccataccatatttccgccttatacgtcgtcgatttgaaacgtttccgacaaatggcggctggtgatcgtctacgacagaattaccatcaattatcggcggatccgaattcgttgagtaatttggatcaggatctgccgaatcatatgcagagcctgttgccgattcatagtttaccgcaggagtggttgtggtgtgaaacgtggtgttcggatgagagtttgaaggaggcgaagacgattgatttgtgtaataatccgcagacgaaggaaccgaagttggagagggcgcggaggcaggttccggagtggaatgtttatgatgaggagattggggggttggcgaagaggtggaaggaggagaagaggaaggggtttgtggacgctgttgtgggattggaggaggagagtatgcaggagaggttgcagagggaggatgcggagagggaggagaggaagaagaaggctgaggggaagagggatgagttgtga

SEQ ID NO: 81 - protein, 1415 aa, Mycosphaerella graminicola
MAVLSGWKAGVLASLLAWANAVPSINVELRTSFGAPPYLVELLETAAEANASSYFPLLDRIADGYFDSSKTDRDLYNSFRSVLQQDSHLSSEALSLFDFALSIHAAAPRIEAHYQYYNTSIVPTLLADESEGCETWAHMSYKRQRYCSPELRESDVIKDYGPADDDVRSLPFDRVLGDDFNEKPSVLYADIESEAFRKFHKKLSPTAKEGSTSYRVRYRATPGYESRPLAVSGYGVELALKRTDYIVIDDRQAEEAKSEDNAGDATLSEEELSDLRPLSSSELRRLGLKASSFVMASEDPFETLLRLSSDFPKHSSPIAATNVSKEFLKEHEHNRELLLPAGYNVMWMNGLQVMSRDVEAYALLEQLRRERKMINDVQSIGLTGAEAVELLSHEAITKSQVGQEAQRYDWRDDAEGGNVIIWLNNIEKDKRYASWPATVNAFLQRTYPGQLPSVRKEVQNLVLPIDFSDLSDVSLVADSIRGFVERQVPIQFGLVPRINSPASKEQAKVFYYLVDRYGVAVALDYLERSVAGSTRKLGGPDEKHFTTAIAERILRRSKEALEFSKIADDEELSARLKPVQAYLARLGDIDAAPHAFINGVPIPRTDEWLQVMSQRIGLDLRVVQQAIYEGTLSDDDYLPDVFLSKASFRRNNIVIPGDDKTLRHLNLGELPHFELLPSLPASKDTIERELVHLTVAADFDTTEGFEQLMEALVFREEHDNVELAVLHIPISPNPAIHMYKKLQGEVATGDNLSARREVYASMRKTAMTGDDINEPGFEKALVINGRVVGPFAQETVLEVADLEALFSYERKRRLLPAALAIESLKLQDKASTPLAFARVSNVIALSLISEVPEGIFEQAPSVRMDTFKKWDSTYTAIRIGDEKTANIQIYAAVDPASEVAQRWIPIIKVLSELEGVYVCLYLNPKERLEEIPIKRFYRHVISSKPDFEDDGSLRAARAQFGGLPADALLNMGMDLPPSWLVAPKHTVHDLDNIKLSAVKSGSDIDAVYELEHILIEGHSKDASSGPPPRGVQLVLGTESDPHFADTIIMANLGYFQFKANPGIYNLALQKGRSEAIFNIDSTGAPAWRTKTFWKHRSKYLSKAAQLGSGLFSSKDDVQAPKHADINIFSVASGHLYERMLNIMMVSVMKHSSHTVKFWFIEQFLSPSFKDFLPIMATAYGFQYEMVTYKWPHWLRGQKEKQREIWGYKILFLDVLFPLDLDKVIFVDADQIVRTDMYELVQHDLEGAPYGFTPMCDSRTEMEGFRFWKQGYWKNFLKGLPYHISALYVVDLKLFRQMAAGDRLRQNYHQLSADPNSLSNLDQDLPNHMQSLLPIHSLPQEWLWCETWCSDESLKDAKTIDLCNNPQTKEPKLDRARRQVPEWTAYDDEIAGVAKRYKDSRSGDLRKLRATKRRRT

SEQ ID NO: 82 - DNA, 4248 bp, Mycosphaerella graminicola
atggctgttctatctggatggaaagcaggagtccttgccagcttgctggcttgggcaaatgctgttccgtccataaatgtcgagcttcgaacctcgttcggtgctccaccatatctggtagagctattagaaactgccgccgaagcaaacgcaagctcgtactttcccctcctcgaccgaatcgccgacggatacttcgactcctccaaaaccgaccgcgatctatacaactcattccgatccgtcctccagcaagactcgcacctctcgagcgaagccctatccctcttcgactttgccttgtcaatacatgccgcagcaccgcgaatcgaagcccactaccagtactacaacacatccatcgttccaacgcttctcgcagatgaatcagaaggatgcgagacatgggcacacatgtcgtacaaaaggcaaagatattgctcaccggagctacgagagtcggatgtaatcaaggattatggaccagccgacgacgacgtgcgttcgctgccattcgaccgcgtgcttggagatgatttcaacgagaagccatcggtgctgtacgcagacatcgaatcggaggctttccgaaagttccacaagaagctaagtccgacagcgaaggagggttccacttcatatcgggtcagatatcgggcgacgcctggctacgagagcagaccactggccgtgagtggatatggagtcgagctggcgttgaagaggacggattacattgtgatcgatgatcggcaagccgaggaggcgaagagcgaagataatgcaggcgatgcgactttgagcgaggaggagctgtccgatctgcggcctctgtcgtcctcagagttgagacgtttgggattgaaagcatctagttttgtgatggccagcgaggatccattcgagacgctgcttcggctctcgagtgactttccaaagcactccagtccaattgctgcgacgaatgtgtcgaaggaattcctcaaggagcacgagcacaaccgcgagctcttgcttcctgctgggtacaacgtcatgtggatgaatggcttgcaggtcatgtctcgcgatgtggaggcatatgcactccttgagcagttgaggcgggagcgaaagatgatcaatgatgttcaaagcattggcttgaccggagcagaggcggtcgagctcctatcacacgaagccatcaccaagtcccaggttggtcaggaagctcaacgttacgattggcgggacgatgctgagggtggtaatgtcatcatttggctgaataacatcgagaaggacaagcgatatgcatcgtggccggctacggtgaatgcattcttgcagcggacgtatcctggccagcttccttctgtcaggaaagaggtgcagaatcttgtcctaccaatcgacttctccgatctcagcgatgtatcgctggtcgccgatagcatccgcgggtttgtggagaggcaggtcccgattcaattcggtctggtcccacggatcaattcgccggcgagtaaagagcaggcgaaggtgttctactatcttgtggaccggtatggtgttgccgttgctctcgactacttggagcgatcagtagcgggatcgacccgcaaactcggcgggcctgatgagaagcactttaccacggcaatcgccgagcgaattctacggcgcagcaaggaggctttggaattcagcaagatcgctgacgatgaagaactttctgcacgcctgaagccggtgcaggcgtatctagcacgacttggggacatcgacgcagctccacatgctttcatcaacggagtgccgatcccaaggacggatgaatggctacaagtgatgagccagaggatcggcctggatcttcgtgtagtgcagcaggccatttatgagggcacgctttctgacgacgactatctaccggatgtctttctgtccaaggcgagcttcagacgcaacaatatcgtcataccgggagacgacaaaactcttcgccatctgaatctgggagagctgccccattttgaacttctgcctagccttccggccagcaaggacacaatcgagcgagagctagtgcatctcacggtagcggctgactttgatacgacggaaggctttgaacaactgatggaggccctcgtctttcgcgaggagcatgataacgttgagctggcagtgttacacattccaatctctcctaatcccgcgatacacatgtacaagaaacttcaaggagaagtcgctaccggagacaacctatctgccagacgcgaggtctacgcttcgatgcgcaagactgccatgactggtgatgatatcaatgagccgggattcgaaaaagcgctggtgatcaatggcagggttgttgggccttttgctcaagagactgtactcgaggtggccgacttggaggcattgttctcgtacgaacggaagaggcgtcttctcccagccgctctggcgatcgaaagcctcaagcttcaagacaaggcatcgacacccctggcgttcgctcgcgtgtccaacgtgattgcactttccttgatctcggaggtaccagagggtatcttcgagcaagccccgagtgtccgaatggacactttcaagaaatgggactccacttacacggcgatccgtatcggcgatgaaaagactgccaacattcagatctacgccgctgtggacccagcatctgaagtggcgcagcgatggatcccgattatcaaggtgttgtcagagctggagggcgtatacgtctgcctgtacctgaatccgaaggagcggcttgaggagatcccaattaagagattctatcgccatgtgatcagctcgaagcctgactttgaagacgacgggtctctccgggccgctcgcgctcaattcggcggccttcctgctgatgcgttgctcaacatgggcatggatcttccgccctcctggctcgtcgcgccaaagcacactgttcacgatctggacaacatcaagctgagcgcggtcaagtctggctctgacatcgatgctgtgtacgagcttgagcatatcctcatcgaaggacactcgaaggatgcttcgagtgggccacctcctcgcggcgtgcagctcgttctcggaaccgagtctgatccacactttgcggacacgatcatcatggcgaatttgggatactttcagttcaaggcgaatccgggcatctacaatctagcgctccagaagggtcgaagtgaggctatcttcaacattgacagcacgggagccccggcatggaggacgaagacgttttggaagcatcgaagcaagtacttgtcgaaagcagctcagctcggctccggcctattcagcagcaaagacgatgtccaggcacccaaacacgccgacatcaacatcttctccgtcgcatctggccacctgtacgagcgcatgctgaacatcatgatggtgtctgtgatgaaacacagctcacacaccgtcaaattctggttcatcgagcaattcctgtccccatccttcaaagacttcctcccaatcatggcaacagcgtacggtttccaatacgagatggtaacctacaaatggccgcactggctgcgaggacagaaagaaaagcaacgcgagatctggggctacaaaatcctcttcttggacgtcttgttccctctcgacctggacaaggtcatcttcgtggatgccgatcagatcgtgcggacggacatgtacgagctcgtgcagcacgaccttgagggcgcgccgtacggtttcacgcccatgtgcgactcgaggactgagatggagggcttccggttctggaaacagggatactggaagaacttcctcaaaggcctgccgtaccacatctccgctctgtatgtcgtggacttgaagttgtttcgacaaatggcggcaggtgatcggctgcggcagaattaccaccagctctccgcggacccgaacagtctgagcaatctggaccaggacctgccgaaccatatgcagtcgttgttgccgatccacagtctaccgcaggagtggctgtggtgtgagacttggtgttcggacgagagtttgaaggatgcgaagacgattgatttgtgcaataatccgcagaccaaggagccgaagctggatcgtgcgaggagacaggtgccggagtggacagcgtatgacgatgagattgctggtgttgcgaagcgttacaaggacagtcggagtggtgatctgcggaagttgagagcaacgaagagacgacggacataa

SEQ ID NO: 83 - protein, 1606 aa, Puccinia striiformis
MKRSAGLRAHLGLLLISTIDVLAGSPPISVSIQATWQEPPILIQVLESAALERPSLFFPSIDAVCSDWENSKSKLSTDKQKYEYLTSLLGSPGLLDGPGGLESLAFSVALKEAQPKIEAFRAWYASLPSNLTGELDSTDQCQSWTLINDSKICNPSELSELLDSNNFSEKIQSQPQVIPFDHQHGQASGNSRVPRVILYASSDPSSFCPLHQVLYKASTKLPSTATYIFRWKIPSGPLKTSSKSQSASLLSGWGASLDIKKSEYLTLDDRPVESSSSDDTQLIIDGTSATENLADSEQAKLKPLKAAEIFDIGAKATQHVLSSPSPLSALRKLTEDFPLVAHTLVNEWVPGRISTELRLELKENMANSIPPGQSVIWMNGLQISSLVSLENLNLFKLVEIMRNERRWIGSLSSLGLNSLQARNLIIDEKLNSAMNPEASSGSAIGEIDASSLGVRFDASDRQEGGGAIIWLNDLENDPRYSMWPSTLRAILRPTFPGQLHPIGRNLINVVLGLDLTQTQNLHTLGHVIEAFITRTLPIRWGIVPIPTKDPSEGEKISRSFWDMTEALGPMEALKFIKEFTQNLEEESRKIDIKKFVIQANERVSNENESSSKDIKSDQDEKFKIWLNKSQLYSSRLSLCSNDHSLPACMLINGRFFPMEENYRSHLQETATLHTGFIQHQVYYNLLKDDQNVADYLYDLPLVHRARNDLVFPSEARPLKFVNLVEALQSTPHVPAANTFFKNADASASDAEPRPIASLWVVGNLDSKVGMSAVAAALGLLKGSMHDVSVQVSFVHTPSDNSETPTELSSSLAELITASVDAKITTQDVIDQLSRHEYQITVSDDGSPTTPGKDNELVLTKIHAQGSDIPVARHQTWLGTHEFARTIGVKSDDGLAIIINGRLVHVSSTTKLLNEDLTLLVEYETQQRINPLMEALKTLDEFDLNKYHSNLPLIMSTVGVVLVGSDDGSSQTSSSEARSAKHLSRDGTHSSYQHGDKEKALFEFSVILNPTSEAAQRWSALLETLSHRSDVSMKIWFNPPLELNELPIKRFFRTAISNSLEFDKDGRSIPALVNFDGIPTETLFTLAIDTPPAWLALPHDSIHDLDNIMLSELPPAYSSQGVEAIFQLEHIILAGHAREVPSDIPPRGLQIVLSDLLRNQEVDTIIMANLGYFQFKSSPGIHRLSIRPGRSLELYQFEKTDSSLGIDDDEPYQFLCLTTFNGLTIYPRVRKRPDKISESLIQPLSASSTSSKKGPVGEFSKLMGQVKDLASGMLRGQGSDLANGTSRSVINVFTVASGLLYERMAYLMCVSVMRHTRSAVKFWFISNFLSPSFKRFIPHLAKEYGFDYQLVTYRWPSWLRAQKEKQRVIWGYKILFLDVLFPLEVDRVIFVDSDQIVRTDLKDLYELDLEGAPYAYAPMCNDRNETKGFRFWDTGYWKESLQGRPYHISALYVVDLRVFRTIAAGDQLRQHYQSLSADPGSLANLDQDLPNNMQSILPIYTLDQSWLWCETWCSDEGLKTAKTIDLCNNPLTHEPKLKRARRLIPEWDTYDQEVAALASRIKKNLNEDDSSAKITVQAGLKIDDEDLNHSVHQKDDQSSSVLDRDEL

SEQ ID NO: 84 - DNA, 4821 bp, Puccinia striiformis
atgaaacgatcggctggtcttcgagctcatctgggcttacttctgatctcgaccatcgatgtattggctggctctcctccgatatctgtctcgattcaagcaacatggcaggaaccaccgatcttaattcaagtcttggaatctgctgctttagaacgtcccagcttattttttccatcgatagatgccgtctgctcagattgggagaattcgaagagcaagctatcgaccgacaagcagaagtacgagtacctcaccagccttctaggctcaccaggattactcgatggtccgggtggattggagtccttagcattcagtgtcgctctcaaagaagcacagcccaagatcgaagctttccgagcctggtatgcgtcactgccatcgaacttaaccggcgaactggatagtacagatcagtgccaaagctggacactcatcaacgattccaagatttgtaacccttcagaactctctgaattactagattcaaataatttttctgaaaaaatccagtcgcaacctcaagtcattcccttcgatcatcagcacggtcaggcatcaggaaactcacgtgtgccgagggtgatactttacgcctcatcggacccgagttccttttgtccattgcatcaagtcctatacaaagcctccacaaagctcccgtctacggctacttacatctttagatggaaaataccctctggaccactaaaaacctcctcaaagtctcaatcggccagtcttctgagtggatggggtgccagtttagatatcaagaaatcagaatacttgacgttggatgatcgaccggtagaatcttcctccagcgacgatacccaactcataattgacggcacatctgctacggaaaatctagccgattctgagcaagctaagctgaagccattgaaggcagccgagatttttgacataggcgccaaggctactcagcacgttctctcctcaccctccccactctcagctttacgaaagttaacagaagatttccctctggttgcacacactctagtcaatgaatgggtacctggcagaatttcgactgagttaagactagagctcaaagagaatatggcaaatagtatcccaccgggccagtctgtaatctggatgaatggactacaaatatcttctctagtctctttggaaaacctcaatttgttcaaattagtcgagattatgaggaacgaacgtcgttggattggatccttgagttctttaggtctcaactcccttcaagctcggaatttaatcatagatgaaaaattaaattcggccatgaatccagaagcctcaagtggatctgcaataggcgaaatcgatgctagctctctgggtgtaagatttgatgctagtgatagacaagagggtggaggagctataatttggttgaatgatttagagaatgatcctagatattctatgtggccttccaccttacgagcaatccttcgcccaactttccccggtcaattacatcccatcggccggaatctgatcaatgtcgtcttaggtctcgatcttactcaaactcaaaacctccatactctcggtcacgtcatagaggctttcattacccgtaccttacccatccgatggggtatcgttcctattcctacaaaggatccatccgaaggagaaaaaatctcgagatccttttgggatatgactgaggctttggggccgatggaagccctcaaattcatcaaagaattcacgcaaaatttggaggaagaatcaaggaagatagatataaagaaattcgtcattcaagccaatgaacgtgtctccaatgaaaatgaatcttcatcaaaagatattaaatccgatcaggatgaaaagttcaagatctggttgaataaatctcaactctattcctcaaggttgtcgttgtgctcaaatgatcatagtcttccagcttgtatgttgatcaatgggcgtttcttccccatggaagagaactatcgaagtcacttacaagagacagcaacactgcataccggatttatacaacatcaagtttattataacttgctaaaagatgatcaaaatgtagcggattacctttacgatcttccgttagttcatcgagcccggaacgatctggtattcccttctgaagctagacctttgaaatttgtgaatctggtcgaagctcttcaatctactccccatgttcctgcggcaaatacgtttttcaagaatgcagatgcgtctgcgagcgatgccgaaccgcgccccatcgcatctttatgggtagttggaaatctcgattccaaggttgggatgtctgccgttgcggcagcactaggcttactgaagggatcgatgcacgatgtctctgtccaagtctctttcgtacatacgccttctgataactccgaaactccgaccgaactctcgagtagcttggccgagctcatcacagcatctgttgatgcaaaaattacgacccaagatgtcatcgatcaacttagccgccatgaatatcaaatcacagtctcagatgatggcagcccaaccacgcctggtaaggataacgagttggtattaaccaaaatccacgcccaaggatcggacataccagtcgcaagacatcagacatggctcggcactcatgagtttgccaggacgattggcgtcaagagcgatgatggcctcgcgattatcatcaatggtcgtcttgtacatgtctcctcaaccacaaagttactgaacgaagatctgacacttcttgttgagtatgaaactcaacaacgcatcaacccattgatggaggcattaaaaaccctcgatgaattcgacttaaacaaatatcattcaaatcttccgttgatcatgtccaccgtcggggttgtcttagtcggctccgatgatggctccagtcaaacttcttcatccgaagcccgttctgctaaacatctctctcgggatggtacccattcatcgtaccagcacggtgataaagaaaaagcgttattcgagttcagtgtgatcctaaaccctaccagcgaagctgctcaacgatggtctgcgttattggagacattatctcaccgttcagatgtctcgatgaaaatttggtttaatcctccattggaacttaatgagcttccgatcaaacgttttttcagaacggcgatttcgaactctttagagttcgacaaggatggacgttccatcccagcgcttgtgaatttcgacgggatcccaacagaaacactgtttacattggcgatagatacgccaccggcctggctcgctctgccccatgactcaattcacgatctcgataatatcatgctttcggagctccctcctgcgtatagctcacagggagtcgaggccatctttcaactagaacatatcatcttggccggacacgctcgagaggtgccgagtgatatcccaccccggggattgcaaatcgtcttgtcagaccttctaagaaatcaggaggtcgatacgatcatcatggctaatttagggtacttccaattcaaatcgtcacctggtatccatcgactatccatacgtccaggaagaagtctagagttatatcaattcgagaagactgattcatcgctcggaattgatgatgatgaaccttatcagtttctatgcttgaccactttcaatggcttaacaatctatccaagggtccgaaaacgacctgataaaattagtgaaagtcttattcaacctctttccgcctcgtcaacatcttccaaaaagggtccagttggtgaattttctaaactcatgggtcaagtcaaagatctagcgtctggaatgctcaggggccaaggatccgatctcgccaacggaacttcgcgatcagttatcaatgtctttactgttgcttcaggattgctgtacgagcgtatggcctatctgatgtgtgttagtgttatgaggcacacccggagtgcggttaaattttggtttatatccaacttcctttcaccttccttcaaacgatttattcctcacttggccaaagagtatggcttcgattatcaattggtcacttatcgttggccatcttggttacgtgctcaaaaagagaagcagagagtgatttgggggtataagattcttttcttggatgttctgttccccttggaggtggatcgagttatctttgtagactcagatcagatcgtccgaactgacttgaaagatctatacgagcttgatttggagggagctccttatgcatatgcgccaatgtgtaacgatagaaatgaaactaagggattccgattctgggatactgggtattggaaagaaagtcttcaaggtcgaccataccatatcagtgccttgtatgttgtagatttgagggtatttcgtacgattgctgcaggggatcaattacgtcaacattatcaatcgctctctgctgatcctggtagcttggctaacctcgaccaagaccttcctaataatatgcagagtatcttaccgatctatactctcgatcagagttggctttggtgtgagacttggtgctctgatgagggtctgaagacggccaagaccatagatttatgtaataatcctttgacgcatgaacctaagcttaaacgagctcgacgactgataccagaatgggacacttatgaccaagaagtcgctgctctagcttctagaatcaagaaaaatcttaacgaggatgattcatctgctaaaattaccgtccaggctggactaaaaatcgacgatgaagatcttaatcattctgtccaccaaaaggatgatcagtcttcctctgttctagatagagatgaactatga

SEQ ID NO: 85 - protein, 1627 aa, Puccinia triticina
MKRPRGLRDRLALLLALGVPARAGSPPITVSIQATWPEPAMVVQVLESVALERPGLFFPSLDAACSAWAETGPAPPATDQQTYEHLVGLLRTPGLLDRPAELEALAFSIALKEAHPAIEAFRAWYSSLPPTLTRPSDAHNHSCQSWALVGSARVCDFSKLSEILDSNDFSQTTHAQPQVLPFDHQQGQASGKTRLPTVILYASPDPRSFCPFHQVLHKASTTIPAKAAYIFRWIIPSAPTAASKSSASLLSGWGASLDIKKSEYLTLDDRPVESASSEDPAQVVPDGHPAAATETALDSSEQAKLKPLKAAEIFDIGAKATQHVLSSPSPLSALRRLTEDFPLIAHTLANEWVPGRISRELRLELKENMAEGIPPGQSVVWMNGLQLSPLVSLENLNLFKLVEIMRSERRWITALTALGFTSRQARALVVDEKLNAAMNPEAASAASAGGEIDASALGARFDASDRQEGGGAILWFNDLEKDERYSMWPTTLRAILRPTFPGQLHPIGRNIINVVLGLDLTRSQNLHNLGHVIEVFISRSLPIRWGFVPIPTKDPAQAERMTRCFWDLVEALGPIETLRFVKEFTAEFEPDAGTVDVEDFLAKASQRVSATNGSPDDAPSQDEKFAVWLAKSQLYSSRLSLCSNDHSLPACMMINGRFFPMEENYRSHLQETATLHTGFIQHQVYFNLLKDDADVAEYLYDLPLVHRARNDLVFPSEARPLRFVDLAETLRSTDALAANVFFHNHDAPGDDDAARPIASLWVVGDLDSSGGMAAVAAALGVLMKPSPDVSVQVSFVHVSSDEAETSAEISAGLATHITGSGDEPVAVQDLLAQLRRHGHPVVAPHPQGTPAVSDHDADELVLRIVRRNRLHRAPTKSAAWVGAQQFASAVRAQSGSIAIIINGRVLQVSSGTKLLSEDLVLLVEYEAQQRITPLVEALKGLDEFEFGRHRANVPMIMATVGYVLVGSSDDSSSPAETRSDKHLSRNGRYSSYQHGDHAKALFDFSVVLNPASEAAQRWSALLETLSHRSDVAIKVWFNPSLELTELPIKRFFRTAISNSLEFDKNGRVVPALVSFQGIPTETLFTLAIDTPPAWLALPHDSIHDLDNIMLSELPAAYSSQGVEAIFQLEHIILAGHAREVPSDIPPRGLQIVLSDLLRNTEVDTIIMANLGYFQFKSAPGIHRLSIRPGRSLELYQFEKPESGGPDAEPYQALSLATFNGLTIYPRVRKRPEKSAESLIQPLSTSPTSSRKGPAGEFSKLMGQVKDLATGMLKSHGLDLANGTSRSVINVFTVASGLLYERMAYLMCVSVMRHTTSPVKFWFISNFLSPSFKRFIPHLAREYRFDYQLVTYRWPSWLRAQKEKQRVIWGYKILFLDVLFPLEVDRVIFVDSDQIVRTDLKALVDLDLGGAPYAYAPMCNDRNETKGFRFWDTGYWKESLQGRPYHISALYVVDLRVFRTVAAGDQLRQHYQALSADPGSLANLDQDLPNNMQGILPIFTLDQSWLWCETWCSDEGLKTAKTIDLCNNPLTHEPKLKRARRLIPEWDAYDQEVAGLASRVKKNTHGEDDPAAMITVQAGQKIDDDERASTAPAEEDVLPDSQPSKHGSADDHQHSPGGHDGGGSRDEL

SEQ ID NO: 86 - DNA, 4884 bp, Puccinia triticina
atgaaacgaccgcgcggcctgcgagaccgactggccctgctgctcgctctgggcgtcccagcacgagccggctcgcctccgatcacggtctcgatccaagcgacatggccggagccggcgatggtagtccaagtcctggaatcggttgcgctcgagcgccccgggctgttcttcccctcgctggacgcggcgtgctcggcctgggcggagacggggccggcgccgccggccaccgaccagcagacgtacgagcatctcgtcggcctcctccgcacccccggcctgctcgaccgccccgccgagctcgaggccctcgcgttcagcatcgccctcaaggaggcccaccccgccatcgaggccttccgcgcctggtactcctccctcccccccactctcacccgcccttccgacgcccataatcacagctgtcagagctgggcactcgtcggctcggccagagtctgcgacttctcaaagctctccgaaatattggattccaacgatttctctcaaacaacccatgcccagcctcaagttcttcccttcgaccatcagcagggccaggcatcaggaaaaacgcgcttgccgacggtgatcctgtatgcctccccggacccgcgctcgttttgtcccttccaccaagtgctgcacaaagcatccacgacgatcccggcgaaggccgcgtatatcttccgatggataataccctctgccccaacggccgcctccaagtcttcagccagtcttttgagcggatggggcgccagtctagatatcaagaagtcggaatatttgacgctcgatgaccgcccggtggagtccgcctccagtgaggaccccgcgcaagtagttcccgatggtcaccccgcggcagcgacggagacggcgctcgattcttcggagcaggccaagctgaagccgttgaaggcggccgagatcttcgatatcggcgccaaggccactcagcacgtcctttcgtcgccttcccctctgtcggctttgcggcggctgacggaggacttcccgctgattgcacacacgcttgcgaacgaatgggtgcctggaaggatctctcgagagctgcgcctcgagctgaaagagaacatggccgagggcatccctcccggccagtcggtggtctggatgaacggcctgcagctctcgcctctggtctccctggaaaacctcaacctcttcaagctcgtcgagatcatgcgcagcgaacggcgctggatcactgctctgactgccctaggcttcacctcccgccaagcccgcgcgctggtcgtcgacgagaagctcaacgcggctatgaaccccgaagcggcatctgctgcatccgctggcggcgagatcgacgccagcgcgttgggcgcacggttcgatgcgagtgaccggcaagagggcggcggggcgatcctctggttcaacgacctggaaaaggacgagagatattccatgtggccgaccaccctgcgtgcaattctgcgacccacattccccggccaattgcaccccatcggccggaacatcatcaacgtcgtcctcggcctcgacctcacccggagccaaaacctgcacaacctcggccacgtcatcgaggtcttcatctcgcgcagcttgcccatccgctggggcttcgtccccatccccaccaaggacccggcccaggcagagcgaatgacgcgatgcttttgggacttggtcgaggccttggggccgatcgagaccctgagattcgtcaaagagttcacagcagagttcgagcccgatgcgggaacggtggatgttgaggacttccttgccaaggctagccaacgcgtctcggccacaaatgggtcccccgacgatgccccctctcaggacgagaagttcgccgtctggctcgccaagtctcagctgtactcgtccagactgtcgctgtgctcgaacgaccacagtcttccagcctgcatgatgatcaatgggcggttcttccccatggaagagaactatcgcagccatttgcaagagacggcgacgctccatacgggattcatccagcatcaagtgtacttcaacttgttgaaagacgatgcggatgtggccgagtacctctacgatcttcccttagtccatcgtgcccggaacgacctcgtgttcccctctgaggcccgacccctgcggttcgtcgacctggccgagacgcttcgatccaccgacgcccttgcagctaatgtctttttccacaaccatgatgcgcctggggacgatgatgcggcgcgccccatcgcatccttatgggtcgtcggagatctcgattccagtggcggaatggcggccgttgcagccgcattgggcgtgctgatgaagccgtcccccgacgtatctgtgcaagtctccttcgtccatgtgtcttccgacgaggctgagacatccgcggagatatcggccggcttagcgacacacatcactggctctggcgacgaaccggtcgccgtccaggatctgctcgcccagctgaggcgtcatggccatccagtcgtcgctccacacccgcagggcacgccagctgtctcggaccatgacgccgacgagttggtcttgagaatcgttcgcagaaatcggctgcatcgcgcccccacaaagagcgccgcatgggtcggcgcacagcagtttgcaagcgccgtccgcgcccaaagcggtagcatcgcgatcatcatcaacggccgggttttgcaagtctcttctggcacaaagctgctcagcgaagatctcgtgctgcttgttgagtacgaagcccagcagcgcatcacgccgttggtggaagcgctgaagggtctggacgaatttgagttcggccgacaccgagcaaatgtgccgatgatcatggccacggtcgggtatgtgttggtgggctcgagcgacgactcgtcttctcccgcggagacccgctcggacaagcatctctctcgcaacggccgctattcatcgtatcaacacggtgaccatgcaaaggcgttgttcgacttcagcgtcgtcctgaatcccgctagcgaggctgctcagcgatggtcggcgctgctggagactttatcgcaccgctcggatgtcgcgatcaaggtttggttcaatccctctttggagctcaccgagctcccaatcaagcgcttcttcaggacggccatctcgaattctttggagttcgacaagaacggccgagtcgtcccggcgctggtcagtttccagggcatcccgaccgaaacactgttcacattggcaatagacaccccgccggcttggctagcacttccccatgattcgatccatgacctcgataacatcatgctttcggagctcccggcggcttacagctctcagggagtcgaggcgatcttccagctggagcacatcatcttggctggccacgcacgcgaggtgcccagcgacatcccgccgaggggcctgcaaatagtgctatcagacctgctcagaaataccgaagtcgacacgattatcatggccaatctagggtacttccaattcaagtctgcgccggggatccatcgtctgtccatccgtcccggacgcagcctggagctgtatcagttcgagaagcctgagtcgggcgggccggatgccgagccttaccaggctttatccctggccacctttaacggcttgaccatctaccctcgcgtccgcaaacgccccgagaaatccgccgaaagcctcatccagccgctctcgacctcccccacctcttcccgaaaaggccccgcgggcgagttttccaagctcatgggccaggtcaaagatctagcgaccgggatgctcaagagccatggactcgatctcgccaacggcacttcgcgctcagtgatcaatgtgtttacggttgcgtcggggctgctgtacgagcgtatggcgtatctgatgtgtgtcagtgtgatgcgacacaccacgagtccggtgaaattttggttcatctcgaacttcctctcgccttccttcaagcgcttcatccctcacctggcccgcgagtatcgcttcgattaccagctggtcacttaccgctggccctcctggctgcgtgcgcagaaggagaaacagcgcgtgatctggggttataaaatcctcttcttggacgtccttttccccctagaggtcgaccgggtcatctttgtggactccgatcagatcgtccggacggatttgaaagcattggtcgacctcgacttgggaggagccccctatgcgtatgcgccaatgtgcaatgaccggaacgagaccaagggattccgattctgggacactggatactggaaggagagtctccaaggccggccgtatcacatcagcgcgctgtacgtcgttgacttgcgggtcttccgaaccgtcgctgcgggcgaccaactgcgtcaacactatcaagccctgtctgccgaccctggaagcttggctaatctcgaccaagacctgcccaacaacatgcaaggaatcctgcccatattcaccttggatcaaagttggctgtggtgtgagacgtggtgctcggacgaaggcttgaagacggcgaagacgatagatctatgcaacaacccgttgacgcacgagcccaagctgaagcgggcgcgtcgactgatcccggaatgggacgcctacgaccaagaagtggcggggttggcgagccgggtgaagaagaatacgcacggcgaggacgacccggcggcgatgatcaccgtccaggccggccagaaaatcgacgacgacgagcgcgcatccactgcgcctgcagaagaggatgtcctcccggatagccaaccgagcaagcatggctctgcagacgaccatcaacattcgccgggtggccatgacggtgggggcagtagggatgaactatga

SEQ ID NO: 87 - protein, 1439 aa, Verticillium dahliae
MTLLCRSPLGLVAIFWAAVNVSAGPSVNVHMQAAFPAGPYLLELLETAAGENATSYFPILDRIASGHFKDSSTHKALYDDFLQLLQDDNHINSPDALSTFKLALSMRLSAPRIEAHYQYYDTAVATHVTGGKQQDCEIWLQFAGSQYCSPTLENPEARVSSIVKLLPFDRVIGTGTDVALYADPASSAFGAFHQALAQKARNGEISYRLRYRRAVGALQEPLPVNGYGVELALKRTDYIVIDDREAQTDGPQKSIATEVVLDKEEEVADLKPLSTSDLAPLGLKAASFITQSQDPWDALLKLTQDFPKFSSSLATHEVSEDFLAEHDKNRAAMAPSGLNALWMNGVQLTERQIEAFTLIDMLRRERRLIDNIRNLGLTGQQAALLLGHPKVASAKNDDEPPRFDWRDEIEEGKVIIWLNDLEKDARYKDLPSELTSLLQRTYPGQLPSIRRNIFTLVVPVDLTSPEDVTVISNLFTFVERRLPVRFGLVPLTPSDDKVAQAKAVYHLMQNYGPEAMVAYLQQSVEDAKISRPDQIVFDRVVAESVALPEASTASFDDVMQSEEQAERIKLAQHWVKRLNAGTTIPPFFLDGLLLPRDKGWLRTMSMKIGGDLQTISASRRNSYIFPEDEKSIQILDVNKIYAEHDNLFSAVPVIQGYAEATKETWAALTIVGDLTTQARKGLARANPGIRLDIVHNSASTTTGPLINAALRKEESALTEVETPEQLKAILDAAETGSDGDYTIALASFLSAATIAPGANALILNGRVIGPITEDLPFDEDDFQLFLESEQTARILPVYAALEDLSLADRLSGPLAAAKLTSITALSTISDVPEGIFESASTVRVNSFEAWDSKHTAIEVGNAETASIHLTGLLNPVSEQGQRWAPILKVLSELDGVHVKLFLNPKEEISELPVKRFFRYVLDSAPSFDESGKVRALGATFKGLPSEALLTTGMDIPPSWLVAPKVCVHDPDNIKLSSIKGDVNVIYQLENILIEGHSREGKAGQPPRGAQVVLGTEKEPLLADTIIMANLGYFQFKANPGFYNINLKDGKTTEIYTIESIGAQGWAPVPGDEGTEVALMDFQGTTLYPRLKRKPGQEKADVLQEDEAEEDGGIISQGLKFAESLLGGSTKSLSAQEHADINIFSVASGHLYERMLNIMMVSVMKNTKHTVKFWFIEQFLSPSFKDFIPHLAEEYGFKYEMVTFKWPHWLRQQKEKQREIWGYKILFLDVLFPLSLDKVIFVDADQIVRTDMMDLVNHPLEGDPYGFTPMCDSRTEMEGFRFWKQGYWANYLRGQPYHISALYVVDLRRFRDLAAGDRLRQQYHALSADPNSLANLDQDLPNHMQFTIPIHSLPQEWLWCETWCSDESQAEARTIDLCNNPQTKEPKLDRARRQVPEWTVYDDEIAALDRRRRGVPEEVIEKNPKSRTLEEPKSTGKDEL

SEQ ID NO: 88 - DNA, 4320 bp, Verticillium dahliae; identical to SEQ ID NO: 72

SEQ ID NO: 89 - protein, 491 aa, Beauveria bassiana
MDHQQNDRYTSSYNNQNAQPYSGNVSSNITPPRSGTPNTDGGRNPFGETPEPAANHRLATNTGTNPFVSPAVSRPASSFGSSSALGPRFEERAQRYFHSRRVAKGEVEKPWLQKKDKKEKWVTIIPIIGILIGLGISGFLVWDGLRSVVHHKYCPLIDDSFDNGLDTGVWTKEVQLGGFGNGEFEMTTPGDENVYVDGGNLFIKATLQDADKMEKTTTIDLKKDGTCTSDDFYDCVAVTNTTAGNSSVVPPVKSGRIHTKKGATLKYGRVEVTAKLPQGDWLWPAIWMMPVKDTYGPWPASGEIDIMESRGNNWTYAQGGNNIVSSALHWGPDPANDAWWKTNNKHKILRGDFGDSFNTFGLEWSQKYLFTYVNTRLMQVLYTNFNKPMWQRGAFPQTTSNGTRLADVWSQTGRKNTPFDQEFYLIINLAVGGTNGWFEDNKSLKPWVNGSPNAKKDFWAAREDWHPTWKQPQMEIQRVVIQKQCDGDEEL

SEQ ID NO: 90 - DNA, 1476 bp, Beauveria bassiana
atggatcaccaacaaaacgaccgctacaccagtagctacaacaaccaaaacgcccaaccgtactcgggcaacgtttcctccaacatcacacctccccgctcaggaaccccaaacacagacggtggtcgcaatccatttggcgaaacccctgagcctgccgctaaccaccgacttgccacgaacactggcacaaatccttttgtcagtcctgccgtctcgcggcctgcctctagctttggctcctccagcgctctcgggccacggttcgaagagcgcgcccagcgctacttccactcgcgccgtgtcgccaaaggcgaggtcgagaagccctggctgcagaagaaagacaaaaaggagaaatgggtcaccatcatccccatcattggtatcctcattggtctcggcatctctggttttctagtctgggatggcctccgcagtgtcgtccaccacaagtattgcccgcttattgatgacagctttgacaatggcctcgacaccggcgtttggaccaaggaggtccagcttggtggatttggtaatggagagtttgagatgactacccccggcgacgaaaatgtctacgttgacggcggcaacctcttcatcaaggccaccctccaggacgccgacaagatggaaaagaccaccaccattgacctcaaaaaggatggtacttgcacttcggatgacttttacgactgcgttgccgtcaccaacaccactgctggaaactctagcgttgtgccgcccgtcaagtctggtcgcatccacaccaaaaagggcgccaccctgaaatacggccgcgtagaagtcaccgccaagctcccacagggcgactggctgtggcccgccatctggatgatgcccgtcaaggatacctacggaccctggccggcctcgggtgaaattgacattatggagtcgcgcggcaacaactggacctatgcccaaggcggtaataacattgtctcgtcggcgctgcactggggccccgatcctgccaatgacgcctggtggaagacgaacaataagcacaagattctgcgcggcgactttggtgacagcttcaatacgtttggcctcgagtggtcgcaaaagtacctcttcacctacgtcaacacgcgcctgatgcaggtactttacaccaactttaacaagcccatgtggcagcgcggcgctttcccgcagacaaccagcaacggtacccgcctagccgacgtctggagtcagactggccgcaagaatacgccctttgaccaggaattctatctcatcattaacctggccgtgggcggcaccaacggctggttcgaggacaacaaatcgctcaagccctgggtcaacgggtctcccaacgccaagaaggacttttgggctgcccgcgaggactggcaccctacgtggaagcagccccagatggagattcagcgcgtggtgattcaaaaacaatgcgacggcgacgaagagctgtaa

SEQ ID NO: 91 - protein, 662 aa, Blumeria graminis
MASNRLQQTQRPLHISTDYSDRGDGSDGLQSEGSPTVISPGSSRNLIPQQRGSIASNMRPGNYRSSLIAESSEMLVPPSRPRGARSYQYLDSPIDSPSRTFSAISSRRGSFDSTGSRESRHSPFGSPFDDSRAPSRAGSDDDNLNTQTVSEKYNIMPSAGLLLFPEDVEKDDWLHNPDPSDKDRDQCDIFTKRGMANLGGLIFICLGMLALFVGYPVLTFVRSIVDPKSGACAASPICLSDKMALLKNQRTGLIDPDTPKSSHSKTSHDGRKLNLVFSDEFNKDGRTFYDGDDAYFEAVDIWYGVTQDLEWYDPDAVSTANGTLNIRFDAFQSHNLNYRSGMVQSWNKLCFKGGRLEASISLPGRGDIQGFWPGFWAMGNLGRPGYPATTDGTWPYSYWDKCDAGITANQSQSDGINLLPGMRLPACTCSHEDHPSPGKSRSSPEIDALEASSGFLGPGEYGGATGVASQSFQAAPFDIFYQPDYQYIEIYDHNVTGMNVYRGGPYQEALSGVTWLNNDWYDGNGYQVYGFEYTPGSKGDVSWFVGDDYTFKIDPRSTRPNGNVGQRVIPEEPMAIVMNFGMSNSFATVFLHNLAQLMPATMRIDYIRIYQGEGDELSCDPEGYPTTKYIKTHPEPYKNPNLTLWSDTGYNWPKNSLLHECT

SEQ ID NO: 92 - DNA, 1989 bp, Blumeria graminis
atggcgtcaaataggttacaacaaacacagcgtccattgcacatatcgactgattactctgatcgaggagatggttcggacggattacaatctgaaggttcacccaccgtcatttctcctggctcttcaagaaaccttataccgcagcagcgaggttcaatcgcctccaacatgcggcctggaaattatcgctcatcattgatcgctgaatcctccgaaatgcttgtaccgccatcacgaccacgcggggcgcgatcataccaatatcttgattcaccaattgatagtccatctcgaactttttcagccatatcatcacgaagagggagttttgattccacgggaagcagagagagtcgacacagcccatttggatcacccttcgatgattcgagagcaccatcaagagctgggagtgatgacgataacctaaatacccagacagtctcagaaaaatataatataatgccttcggcaggccttttactttttcctgaagatgtggaaaaagatgactggctgcataatccagatcccagcgataaagatcgagatcaatgtgatatctttaccaagcgtggaatggcaaatctaggtgggttgatatttatatgcttgggaatgcttgctttgtttgttgggtaccccgtgctaaccttcgttcgctcgattgtcgatccgaaatcaggagcatgcgctgctagtcctatctgtctgtctgataagatggccctgctcaaaaaccagagaactggtctcattgacccagatacaccaaaatcttctcactctaaaacatcgcacgatggcaggaagcttaaccttgtattttctgatgagttcaataaagatgggcgcacattttatgacggtgatgacgcctactttgaagcagtagatatttggtacggtgtaacacaggatctcgaatggtatgatccagatgcagtcagtacagccaacggaacacttaacataaggtttgatgctttccaaagtcacaacctcaactatcgttctggtatggtacagtcttggaacaaactatgttttaagggaggccgattggaagccagtatttctcttcctgggagaggtgatattcaaggcttttggccaggtttctgggcaatgggtaacttgggacgaccagggtaccccgcaactacagacggaacatggccttacagttattgggataaatgtgacgcaggtattaccgcaaatcagagccaatctgatggtatcaacttattgccaggtatgaggctacccgcctgcacctgttcccatgaagatcacccttcgcccggaaagtctagatcctctcccgaaatcgatgccctcgaggctagcagtggtttcctcggtccaggagaatacggaggtgctacaggcgtggcttcgcagtcattccaagctgctccttttgacatattttaccaacctgactaccagtatattgagatctatgatcacaacgtgactggtatgaatgtttatcgtggtggaccctaccaggaagctctatcaggcgtgacctggctcaacaacgattggtatgacggaaacgggtatcaagtttatggcttcgaatacacgcctggctcaaaaggggacgtgagctggtttgttggtgacgactacacctttaagattgacccccgctctactcgaccaaacggaaatgttgggcagcgagttattccagaagagcccatggcaatcgtaatgaactttggcatgtcaaatagctttgccacggttttcttgcacaatcttgcccagctcatgcccgcaactatgagaatcgattacattcgtatctaccagggtgaaggtgatgaattatcctgtgacccagaaggatatcctactacgaaatatattaaaactcaccctgaaccttacaagaacccaaatctgactctctggtccgacacaggctataactggccgaagaacagtctgctccatgaatgtacatga

SEQ ID NO: 93 - protein, 453 aa, Botryotinia fuckeliana
MQKLTSNANTPKSTPQSEENSRAQTPVGTSNPFATPPYSRPASTIGARSGFQYAEVPGTGYFRSRRVRKADAIPLPVNKKAKKEALLWVFPLGGLILGLGLTGLIIYLKLSEITHHKYCPVLSEDFSSGTLDPSIWTKEVQVGGFGNGQFEQTTTDAENLFIQDGQLYIKPTIQDASLITTNNIINLTADGTCTTTSNILVNCVTSTNTTNGTIVQPAKSARINTKLGATIKYGKVEVKAKLPKGDWLWPAIWMLPVEDTYGSWPQSGEIDIMESRGNNYTYSLGGNNFVSSSLHWGPDLASDAYKKTTNVRAALHSQFGDDFHIYGLEWTEKFIFAYIDNTLRQVMYWPFSRPLWPQGNFPLSDANGTAIVDPWSQTGRKNTPFDQEFYLILNVAVGGENGWFLDGADGKPWVDGSASAKLDFWKARNEWLPTWEKSGQMIVDQVNMWQQCD

SEQ ID NO: 94 - DNA, 1362 bp, Botryotinia fuckeliana
atgcagaaacttacatctaacgccaacactccaaagagtacccctcaatctgaggaaaacagtcgtgcacagactcccgttggtacttcgaatccattcgcaacgcctccatactcaagacctgcctcgacaattggggctcgatctggatttcagtatgccgaagtccctgggacaggatactttcgatctcgtcgagttcgcaaagcagatgctatacctcttccagtcaacaaaaaggcaaaaaaagaggcccttttatgggtttttcctctcggcggcttgattcttggattaggtcttactggtctcattatttacttgaaactatctgagatcacacaccacaagtactgtccagttctttcagaggacttttcctctggtactttagatccaagtatttggacaaaagaagttcaagtaggaggttttggaaatggacaatttgagcaaaccacaacagatgccgagaatcttttcattcaagatgggcaactttacatcaagcctacaattcaagatgcatcgttgatcaccaccaacaatatcatcaatctcacggccgatgggacttgcacaaccacctccaatatacttgtcaattgtgtcacttctacaaacacaaccaacgggactatcgtgcaaccagccaagtccgctcgcatcaataccaagcttggtgccacaatcaagtacgggaaggttgaggtcaaagctaagttgccgaaaggagactggctctggccagctatctggatgttgccagttgaggatacctatggatcctggccacagagtggtgagattgatatcatggaatctcgtggcaacaactacacgtacagtcttggtggcaacaattttgtatcaagttctctgcattggggtccggatctagccagcgatgcatacaaaaagactaccaacgtgagagctgctttgcactcccagttcggtgacgattttcacatttacggcttggagtggaccgagaagttcatctttgcgtatattgataacacgctgcgccaagtcatgtattggccgttttccagaccattgtggccacagggaaatttcccattgagcgatgctaatggaacagcgatcgtggatccatggtcacaaacgggccgaaaaaataccccgttcgatcaagaattttatcttatcttgaacgttgctgttgggggggagaacggctggttcctggatggagcagatggaaaaccatgggttgatggaagcgcatctgcaaagctcgatttctggaaagctcgaaacgagtggcttcctacatgggagaagagtggacaaatgattgtggaccaagtgaacatgtggcaacagtgtgattag

SEQ ID NO: 95 - protein, 718 aa, Candida albicans
MARRNLTKNTNGNEYQNTNPFVNQANQNYNNNSTRQSYPGFTDPFNSSNRLDDGSFDFENRSSYPSSSTSTSSIANQYGRPFTVGNGLSSSNGSSGSHLLQGQNDYNLSSSPNLQHQQLQGAENDKSSSLLNSNINNIKVDVPYDYDRYPKIIGRVSSSNSLNNTSNTAPYQSETPSISSNSFNKNVNNTLNGSYNNMIDFSPFGGYPASSFPLNIDEKEPDDYLHNPDPVHDVIYEKNRFWNDLKTADRKSFGGILGFLFLIAAAVAVFVVVPALTYSGVTTHSPPQEYEILSHYSYPLLSAIRTSLIDPDTPQDALKMKAKDGSNWSLVFSDEFNIMGRTFYEGDDQFWTAPDLHYDATKDLEWYDPDAATTSNGTLNLQMDAFKNHDLFYRSGMVQSWNQLCFTQGKLVISARLANKGTVSGLWPGIWTMGNLGRPGYLASTEGIWPYSYDSCDSGITPNQSSPDGISYLPGQRLNKCTCPGESHPNRGVGRGAPEIDVIEAEISTDATGNRENLGVASQSLQLAPMDIWYYPDLDYLEIYNTSITTMNTYTGGPFQQALSGTTTLNKTWYELGGNGVHNFQTYGYEYLNDKDNGYLRWFVGDNPTLTVYPQALHPNGNVGWRPLSKEPMSIVMNLGVSNNWAYIDWPSLSFPSTFRIDYVRLYQPPNQINVGCDPAGFPTSDYIEQHINVYQNANLTSFEDGGYSFPKHSLIGC

SEQ ID NO: 96 - DNA, 2157 bp, Candida albicans
atggcaagacgtaatttaaccaagaataccaatggtaatgaatatcaaaatacaaacccatttgttaatcaagctaatcaaaattataacaacaactccacaagacaatcttatcccgggttcactgatcctttcaattctagcaacagacttgatgatggatcatttgattttgaaaatcgttcttcttatccatcttcttccacatccacttcgtctattgccaatcaatatggtcgtcctttcacagtaggtaacggattatcatcaagtaacggaagcagcggctctcatttattacaaggtcaaaatgattacaatctactgctgctgccaaatctacaacaccaacaactccaaggtgctgaaaatgataaatcgtcgtcccttctaaattccaatataaataacatcaaagtcgacgtaccttatgactatgacagataccccaaaatcattggcagagtatcatcgagtaactcgttaaataatactagcaacactgccccctatcagtctgaaacaccatcaatatcatccaactcattcaataaaaatgtcaataatacattaaacggtagctacaacaacatgattgattttagtccatttggtggctatcctgccagttcattcccacttaatatcgatgaaaaagaacctgatgattatcttcataatcctgacccagttcacgacgtgatttatgagaaaaatagattttggaatgatttgaaaactgctgatcgtaaatcatttggtgggattttgggcttcttatttttgattgcagcagcagtggcggtgtttgttgtggtcccagcattgacttattcgggagtaaccactcatagtcctccacaggaatacgagattttaagccactattcatatccattactttcagcaattcgtacttcattgatcgacccggatactccacaggacgctttgaaaatgaaagctaaagacggtagtaattggtctttggttttcagtgatgaatttaatattatgggaaggactttctatgaaggcgacgatcaattttggacagcccctgacttgcactatgacgccactaaggacttggaatggtacgaccccgatgcagcaactacgagtaatggtactctcaatttacaaatggatgcatttaaaaatcacgatttgttttatcggtcagggatggtacaaagctggaaccagttatgctttactcagggtaaacttgttatctcggcacgtttagctaacaaaggtaccgtttctggattatggccagggatatggacaatgggtaacttaggtcgccccggatacttggcttctaccgaggggatatggccatattcgtatgactcttgtgattctggtatcactcctaaccaatcatcacccgacggtatttcatatttacccgggcaaagattaaacaaatgtacttgtcctggtgagtcgcatcctaatcgtggtgttgggcgtggtgctccggaaattgatgtcattgaagcagaaattagtactgatgccactggcaatagagaaaatcttggtgttgcatcccaatcattacaattagcaccaatggatatttggtactaccctgaccttgactatttggagatttacaacacttctataaccaccatgaatacttatactggtggtccgtttcaacaagcattgtcaggaaccaccacattaaataaaacttggtacgaactaggaggtaatggtgtacacaattttcaaacgtatggatatgaatatttaaatgataaagacaatgggtatttaagatggtttgttggtgataatcctacattgacagtttacccacaagcattgcaccctaatgggaatgttggatggagaccattgagtaaagaacccatgtcaattgttatgaatttgggggtttcaaataattgggcttatattgattggcctagtttgagtttcccatcaacattccgtattgattatgttcgtctttatcaaccaccaaatcaaattaacgttggatgtgacccagcagggttccctacttctgattatatcgaacagcacatcaatgtgtatcaaaatgctaatttaacttcatttgaagatggtgggtatagtttcccaaaacattcgttaattggttgctaa

SEQ ID NO: 97 - protein, 736 aa, Candida albicans
MASQRDLTSNNPHFHISSSRNNTNDDFNSDHNPRNPFGDEPEEEELDSASFSSSSQNNQPHHPFATSNQTSSINNLHSTNSIRNEAEYGKPFQAYSGYYSNGGSSSYLNQEGVISDESRLLSSGNNNNNNRDVSSVGGGGGSGDNRLNPTSPAEFDRYPSMAGSRVVSSTSLVSFNNPSNMMRNHHQHQPHLGSSSSPTSSSMNNDSISDKSTSPFPNDFSPFGGYPASSFPLSIDEKEPDDYLHNPDPVQDAEYEKNRFMHDLKNMDKRSLGGLIGFIILFIAALAVFIILPALTYSGATNPYHPESYEVLTKYSYPMLSAIRMNLVDPDTPESAYKKKAKDGSEWVLVFSDEFDAEGRTFYEGDDQFFTAPDIHYDATKDLEWYDPDAVTTANGTLNLRMDAYKNHNLFYRSGMVQSWNQLCYTQGHLEISARLPNYGNVTGLWPGLWSMGNLGRPGYLGSTDGVWPYSYDSCDAGITPNQSSPDGISYLPGQRLNKCTCPGELHPNRGVGRGAPEIDVIEGEVMTDSSGKKENCGVASQSLQLAPMDIWYIPDYNWVEIYNFSVSTMNTYTGGPFQQALSATTMLNVTWYEFGDNAHNFQTYGYEYLNDPETGYLRWFVGDDPTLTVYSQALHPDGNIGWRPLSKEPMSLILNLGISNNWAYIDWPSISFPVTFRIDYVRVYQPPDQINVGCDPTDFPTYDYIQQHLNLYENANITSFEDGGYKFPKNSLIGC

SEQ ID NO: 98 - DNA, 2211 bp, Candida albicans
atggcgtctcaaagagatttaacttcaaataatccccatttccatatatcgagttctcgtaacaataccaatgatgatttcaattccgatcataatccaagaaatccatttggtgatgaaccagaagaagaagaattagattcagcatcattttcatcctcatcacaaaataatcaaccccatcacccttttgctacatcaaatcaaaccctgagcattaataatcttcatagtaccaacagtattcgaaatgaagctgaatatggtaaaccattccaagcttatagtggctactattcaaatggtggtagttcactgtatttaaatcaagaaggtgtgatttctgatgaaagtagactattatcatcgggtaataataataataataatcgagatgtatctagtgttggtggtggtggtggtagtggtgacaatagattgaatccaaccagtccagcagaatttgatagatatccatcaatggcaggttcaagagtagtatcatctacttcattagtgtcgtttaataatccttccaatatgatgcgtaaccaccatcaacatcaacctcatctcggttcatcttcatctccaacttctagtagcatgaataatgattctatatcagataaatcaactagcccctttcctaatgatttcagtccatttggtggataccctgctagttcattcccattgagtattgatgaaaaagaaccagatgattatttgcataatccagatccagtacaggatgctgaatacgaaaagaaccgatttatgcacgatttaaagaacatggataaacgatcattgggtgggttgattggatttattatattatttatagctgcattagcagtgtttatcattttacctgcattgacttattctggagctactaacccttatcatccagaaagttacgaagttttaactaaatatctgtacccaatgttgagtgctataagaatgaatttagtggatccagatactcctgaatcagcttataaaaagaaggctaaagatggtagtgaatgggtattagttttcagtgatgaatttgatgctgaaggtagaactttttatgaaggcgatgatcaatttttcactgctcctgacattcattacgatgccactaaagatttagaatggtatgatccagatgctgtaaccacagccaatggaacattaaatttacgtatggatgcttataaaaatcataatttattctatcgttcaggaatggtacaaagttggaatcaattgtgttatactcaaggtcatttagaaattctggctcgtttaccaaattatggtaatgtaacagggttatggcctgggttatggtctatggggaatttaggtagaccagggtatttgggatctactgatggggtatggccatattcttacgattcatgtgatgccggtattacacctaatcaatcttctcctgatgggatttcttatttgccaggtcaaagattaaataaatgtacttgtccaggtgaattacatcctaatcgaggtgttggtagaggtgcccctgaaattgatgttattgaaggtgaagtgatgactgatagtagtggtaaaaaagaaaattgtggtgttgcctctcaatccttacaattagcccctatggatatttggtatattcctgattataattgggtggaaatttacaatttttcagtttcaacaatgaatacttatactggtggaccattccaacaagcattatcagcaacaaccatgttgaatgttacatggtatgaatttggtgataatgcccataatttccaaacttatggttatgagtatttaaatgaccctgaaacgggttatttacgatggtttgttggtgatgatccaacattaacggtttattcacaagctttacatccagacggaaatattggttggagacctttaagtaaagaaccaatgtcattaattttaaatttggggatttcaaataattgggcttatattgattggccaagtatatctttccccgtcacatttagaatcgattatgtaagagtttatcaaccaccagatcaaattaatgttggttgtgatccaaccgatttcccaacttatgattatattcaacaacatttgaatctttatgaaaatgccaatataacttcatttgaagatggtggatataaattccctaaaaatagtttaattggatgttaa

SEQ ID NO: 99 - protein, 737 aa, Candida albicans
MERDLTYNAPKIKFTDTEGQEEHFYFNRSNNSTNDLTSHDSSSTQLQDANSRRQAPPPPPHNPFSDNSHENSTESLYQSETRFHQPLLHNDSNNSNSSIGNNRQRIPSQQHDTSSLYSASPISTSPLVSNFQSYSDNQDEMTRGKYNQNTNRSSSNYIQHSPTSAGYDRYPLKTQSSIGGSMSRIGLSSSSPSQQQQQHMYDNNSSNRSSYSPDSATDLMVYENGEFSPFGGYPASLFPLSIDEKEPDDYLHNPDPVQDAEYDKNRFLYDLKTMDKKSMNGLIAFIVMFLIAIAIFIILPVFTYTGYNPKAKNFENYEVLTRYSYPRLSAIRTSLIDPDTPEDALFWKSKNGEEWPLVFSDEFNAEGRTFYEGDDQFFTAPDLHYDATKDLEWYDPDAVTTANGTLTLRMDAFKNHGLFYRSGMIQSWNQMCFTQGKLEFSAKLPGYGNITGFWPGLWSMGNLGRPGYLASTEGVWPYTYDSCDAGITPNQSSPDGISYLPGQRLNKCTCPGEAHPNRGVGRGAPEIDALEGEIHGVIGRVSQSLQVAPYDIWYMPNYDFLEIHNSSITLMNTYAGGPFQQAISGVTMLNVTWYEYGDHQHNFQKYGYEYLNDDESGYLRWFVGDNPTFTIYSQALHPNGNVGWRKLPKEPLSLILNFGISNNWAYIDWPSLVFPSTMRVDYVRVYQPKDQINVGCDPTDFPTYDYIQQHLNVYQNVNLTKFEDGGYTFPKHKLIGC

SEQ ID NO: 100 - DNA, 2214 bp, Candida albicans
atggaaagagatttgacttataatgccccgaaaataaagtttaccgatactgaaggacaagaagaacatttttatttcaatcggagtaacaattcaaccaatgatttaaccagtcatgactcttcatcaactcaactacaagatgccaattccagaagacaagccccaccaccaccaccacataatccattttctgacaattcccatgaaaatagtactgaatcattatatcaatcagaaacaagatttcatcaaccactacttcataatgatagtaataatagcaatagcagtataggcaataatagacaacgtattccatcacaacaacatgatacactgtcattatattcagcatcaccaatatcaacatcacctttagtttctaattttcaatcatatctggacaaccaagacgaaatgactcgaggtaagtataaccagaatacaaatcggtcaagttcaaattatattcaacacagtccaacatcagcagggtacgatagatatccgcttaaaactcaatccagtattggtggatcaatgctgagaattggtttatcatcatcatcgccatcacaacaacaacaacaacacatgtatgataacaattcatctaatcgatctctgtattcacctgattccgccactgatttaatggtttatgaaaatggagaatttagtccatttggaggatatccagcaagtttattccccttaagtattgatgaaaaagaacccgatgattatttacataatcctgatcctgttcaagatgccgaatatgataaaaatcggtttttatatgacttaaaaaccatggataagaaatctatgaatggattaattgcatttattgtaatgtttttaattgctattgctatatttataattttaccagttttcacatatactggatataaccccaaggcgaaaaattttgaaaattatgaggttttaactagatatctgtatccaagattaagtgctatccgaacttcattaattgatcctgatactcctgaagatgccttattttggaaatctaaaaatggtgaagaatggccattggtgtttagtgatgaatttaatgccgaaggtagaacattttatgaaggtgatgatcaatttttcactgcaccagatttacattatgatgccactaaagatttagaatggtatgatcccgatgctgtaactacggctaatggaacattaactttacgtatggatgcttttaaaaatcatggattattttatcgatcagggatgattcaaagttggaatcaaatgtgttttactcaggggaaattggaatttctggcaaaattacccgggtatggtaatatcactggattttggcctgggttatggtcaatgggaaatttaggtcgtccagggtatcttgccctgactgaaggtgtttggccatatacttatgattcatgtgatgctggtattacacctaatcaatcttctccagatgggatttcttatttaccaggtcaaagattaaataaatgtacttgtccaggtgaagctcatcctaatcgtggtgttggtagaggtgcccctgaaattgatgcattggaaggggaaattcatggtgttataggtagagtttctcaatcattacaagttgctccttatgatatttggtatatgcccaattatgattttcttgaaattcataatagttcaataacattaatgaatacttatgctggtggacctttccaacaagctatttcgggtgtaacaatgttaaatgttacatggtatgaatatggtgatcatcaacataatttccaaaaatatggttatgaatatttaaatgatgatgaatcaggttatttacgttggtttgttggtgacaatccaacttttacaatctattctcaagctttacatccaaatggtaatgttggttggagaaagttacctaaagaacctttaagtttgattttaaattttggtatatctaataattgggcttatatcgattggccaagtttagttttcccttcaactatgagagtcgattatgtaagagtttatcaacctaaagatcaaattaatgttggttgtgatccaaccgatttcccaacttatgattatattcaacaacatttaaatgtttatcaaaatgttaatttaacaaaatttgaagatggtggttatactttccccaaacataaattaattggatgttaa

SEQ ID NO: 101 - protein, 693 aa, Candida glabrata
MTVRNLTGRDYRSSRSSSFDNNTGNPFLASEEENDDDRSSSSFIHYDRDASRQAALEGLDGQRHVSDYKGYYSKNNTAQNLNTGNGNTPNLDNSKRYFSQTSLNTGLTRNDILSPPEFDRYPLVGSRVASSTQLHQQAYSSSPVPRMASSPDNSGSSFSSTNNNTFLGEQDFSPFGGYPASSFPLLMEEKEDDDYLHNPDPEEEARLDRKRFSNDFKYMDKRSAGGLAGVLFLFIGLGCLFILLPALTYTGVTEHAKPVVQEILSAYQYPQLSAIRTKLVDPDTPQSALSRQARDGSYWKLVFSDEFNAEGRTFYDGEDQFWTAPDIHYDATKDLEWYSPDASTTRNGTLQLRMDAFKNHNLYYRSGMLQSWNKLCFTQGAIEVSANLPNYGRVSGLWPGLWTMGNLGRPGYLGSTDGVWPYSYSSCDAGITPNQSSPDGISYLPGQRLSVCTCDGEEHPNQGTGRGAPEIDILEGATDTVLGVGTASQSYQVAPFDIWYIPDYDFIEIHNFTTTTMNTYCGGPFQQAISAVTTLNTSWYQYGEGSGYYQKFAIEFLNDDEDGYIQWYVGDKATWTLMNTALHANGNIDNRHVSKEPMSIILNLGISNNWAYIDWQMIYFPVTMSIDYVRIYQPNNSVSVTCDPPDYPTYDYIKDHPIVYNDANVTKWNLAGYSTPKNILTGNCKSSKFKLSS

SEQ ID NO: 102 - DNA, 2082 bp, Candida glabrata
atgactgttagaaatttgacaggacgtgattaccgttcctccaggtcttcttcatttgataacaacacgggcaatccgtttctggcgagtgaagaagagaacgatgacgatagaagttcttcctctttcatccattacgacagggatgcgtctcgacaagcggcgctagagggccttgacggtcagcgccatgtgtccgattacaaaggttactactctaagaataacactgctcaaaacttgaatacgggcaatggcaacactcccaacctggacaacagcaagagatacttttcacagacgtctctgaacactggtcttacaagaaatgacatcttgtcccctcctgaatttgatagatatccattggttggttcgagagttgcctcctctacccagttacaccagcaggcatactcatcttctccggtgcctcgcatggcttcatcgcctgataactctggatcctctttttcctctactaacaataatactttcttaggtgaacaggatttctctccctttggtggctatcctgcttcatctttcccactactgatggaagaaaaagaagatgacgattacttacataacccagaccctgaagaggaggctagactggacagaaagagattttccaacgacttcaagtacatggataagagatccgccggtggtcttgcgggtgttcttttcctattcatcgggctgggatgtttgttcatcctactgccagcattaacctacacaggtgtcactgaacacgctaagccagtggtacaagaaatcttgtccgcttaccagtatccacaattgtcagcaataagaactaagctggtggacccagacacacctcaatcagctctgtcaagacaggcaagagatggttcatactggaagctggtattctcagatgaatttaatgcagagggaagaacattttatgacggtgaagaccaattctggaccgctcctgatatccactacgatgccactaaggatttggaatggtattcccctgatgcatcaactacacgcaacggtactctacaactaagaatggatgctttcaaaaaccacaacttatactacagatctggtatgttacaaagttggaacaaactatgttttacacaaggtgccatcgaagtctcagctaatttgcctaactacggtcgtgtatctggtctatggcctggtctatggactatgggtaacctgggtagacctggttacttaggttctactgatggtgtttggccatattcgtattcttcttgtgatgcaggtatcacaccaaaccaaagttcgccggatggtatctcgtacttaccgggccaaagattaagtgtctgtacttgtgatggtgaggaacatccaaaccaaggtaccggtagaggtgctcctgaaatcgatattcttgaaggtgctaccgatacagtcttaggtgtaggtacagcatcccaatcctaccaagttgcaccatttgatatctggtatattccagactatgacttcattgagattcacaatttcactacaaccactatgaatacttattgtggtggtccattccaacaggctatttctgctgtgaccactttaaacacttcatggtatcagtatggtgaaggatctggatattaccagaaatttgcaattgaattcttgaacgacgatgaggatggatatatccaatggtatgtcggtgacaaggccacttggactttaatgaacacagctttacacgccaatggtaacattgataatagacacgtcagtaaagagcctatgtccatcattttgaacttaggtatctccaataactgggcttacattgattggcaaatgatctacttcccggtaaccatgtctattgactatgtcagaatatatcaaccaaacaacagtgttagtgttacctgtgatcctcctgattatccaacatacgattacatcaaggatcacccaattgtctacaacgacgctaatgttaccaagtggaatctggctggctactccacaccaaagaatatattgactggtaactgtaagagctcaaagttcaagctgtcctcttag

SEQ ID NO: 103 - protein, 743 aa, Candida glabrata
MSYRDLTGNHPDDANRDAGSSALSSSSSSIANEHKQMANDKNLRNPFVTTSEEDVHSTSSSQNLLPHDNNYELAHTPDLIAPEHHFTSSSGSNSNPASLNEKMAADYKGYYSKHNKGSPSRFYSANSRKNSSSITPPLNIGNYSDLSSNDIRAPPAFDRYPLVGSRLHLSNYRQNFIKNDSPPPPFKNEKLADGESSLIVPSSVMFLDDQDFSPFGGYPASAFPLSMDEKEDDDFLHNPDPEEEARLDKHRFSEDLKHMNKKSFGGILGVLFLFLGAIALFIILPVLTYSGAVDHHDNNIHPANSTNFTNHNAVPLSLYQYPQLSAIRTSLVDPDTPQSALTRKAKDGSDWRLVFSDEFNAAGRTFYDGDDQFWTAPDIHYDATKDLEWYSPDATTTRNGTLQLRMDAFKNHNLYYRSGMVQSWNKLCFTQGALEISANLPNYGKISGLWPGLWTMGNLGRPGYLASTEGVWPYSYSSCDAGITPNQSSPDGLSYLPGQKLSACTCDGEDHPNPGVGRGAPELDILEAEASTELRVGVASQSLQIAPFDIWYIPDYNFVEIYNFSTTTMNTYCGGPFQQAISAVTTLNASWYEFGEGSGKFQKFAIEYLNDKNKGYIRWFVGDNPTFTMYSTALHPNGNIDWRYISQEPMSIIMNLGISPNWAYIDWQMIYFPVVMSIDYVRLYQPENAVSLTCDPEDYPTYDYIESHKNAYYNANLTSWKMAGYTFPKNQLTGNCKSSNFKH

SEQ ID NO: 104 - DNA, 2232 bp, Candida glabrata
atgtcatatagagaccttactgggaaccacccagacgacgctaatagggatgctggcagctcagcactatccagctcctcgtcttcaatcgctaatgaacataagcaaatggcaaatgataaaaacttacgtaaccccttcgttaccactagtgaagaggatgtgcactctacttcttcttcccaaaacttgctaccacacgataacaactatgagctggctcatacccccgatctaatcgctcccgaacaccacttcactagcagttctggcagtaatagcaaccctgcctccttgaatgagaagatggcagccgactacaagggctattactcaaagcacaacaaggggtcccccagcagattctactctgcaaactctaggaagaactccagctctataactccgcccctgaacataggcaactactctgacctgtcgagcaacgatatacgtgcgccacctgctttcgacaggtacccgctagtgggctcgcggttgcatctcagcaactacagacagaacttcataaagaacgactcacctccgccacctttcaaaaacgagaaactcgcagacggcgagagctcattgatagtgccttcctcagtcatgtttctggatgaccaggacttctccccgttcggtggctacccagcatcggcgttccctctgtccatggatgagaaagaggacgacgacttcctgcacaacccggacccagaagaagaagctaggctggacaaacacaggttctcagaggacttgaagcacatgaacaagaaatccttcggtggtatactgggcgtgctgttcttgttcctcggtgccatcgccttgttcatcatcttgccagtgctaacatactcgggcgcagtagaccaccacgacaataacatacaccctgcgaactccacaaacttcacaaaccacaacgcggtaccgctgtccctgtaccaataccctcaactgtcggccatcagaacatcgctggtggaccccgacacccctcagagcgccttgactagaaaagccaaggacggcagtgattggaggctggtcttctcagatgaatttaacgctgccggaaggactttctacgacggagatgatcaattttggaccgccccagatatccattacgatgcaacaaaggacttggaatggtactccccagatgcgaccacaacaagaaacggtaccttgcaattgagaatggacgctttcaaaaaccacaatctatactacagatctggtatggtacagagctggaacaaattatgctttactcaaggagctttggagatttctgccaacttgcccaattatggtaaaatcagtggcttgtggccaggtttatggacaatgggtaaccttggcagaccaggttacctagcatccactgaaggtgtctggccatactcttattcttcctgtgatgcaggcatcacacccaaccagagttcaccagacggactatcatacttgccaggccaaaagctaagtgcttgtacgtgtgatggagaagatcatcctaacccaggtgttggtagaggtgctcctgaacttgatattctggaggcagaagcaagcactgagcttcgtgtaggtgtggcatctcaatcgttacaaattgcgccattcgacatttggtacatccctgattataattttgttgaaatctacaacttcagcactaccactatgaatacttactgtggtgggccatttcaacaagcgatctctgctgtgacaactttaaatgcctcatggtatgaatttggagaaggctctggtaaattccagaaatttgcaatcgaatatctaaacgataagaacaaaggttacatcagatggtttgtaggagataatccaacgttcaccatgtattcgacagctcttcatcctaatggtaatattgattggaggtatattagtcaagagccaatgtctattattatgaacttgggtatttcaccaaattgggcgtatattgactggcagatgatttatttccccgtggttatgtcaatagactatgtgagactatatcaaccagaaaatgccgtgtcattgacttgtgacccagaagactatccaacgtatgactacattgaatcccacaaaaatgcgtattataatgcaaatttgacaagctggaagatggctggctacacattcccgaaaaatcaattgactgggaactgtaagagttccaatttcaagcattga

SEQ ID NO: 105 - protein, 718 aa, Candida tropicalis
MARDLTYNAPKIRFVDSEGHEENFQFSNNNSTTDLNSQSSTVNNNNNNQIQNPFSDQSNTNSSDSIQFNVSTPTNDRFPNNQQQPIINYSETNSIYSDSPNTTQRSQFQPLLNSTYRQSSPIPVPISNESNNNLNNNNSIMTQPSGLDRYPKHVQPSSSTSQQSISFQNSNITKDINSSIDNNSNYSSSSFTQNSSNELMGIYDNSQDFSPFGGYPASSFPLSIDEKEPDDYLHNPDPIQDAEYDKNRFIYDLKNMDKRSMGGLIGFIILLIGALAIFIVLPVFTFAQYGSKITTMKYEILTDYTYPMLSAIRQNLVDPDTPEDALTWISKDGDEWVLVFSDEFNAIGRTFYEGDDQFFTAPDFHYAATQDLEWYDPDAVTTENGTLNLRLDAFRNHNLLYRSGMVQSWNQMCFTQGKLEFSARLPGYGNITGLWPGLWSMGNLGRPGYLASTEGVWPYTYDSCDAGITPNQSSPDGISYLPGQRLNKCTCPGEDHPNPGVGRGAPEIDALEGEIHGIIGRVSQSLQIAPYDIWYYPDYDYMEIHNSSVTLMNTYTGGPFQQAVSGVTMLNTTWYQFGDNANNFQKYGYEYLNDDENGYLRWFVGDDPTFTMHAKALHPNGNIGWRQLPKEPISLIMNLGISNSWAYIDWPSLMFPSTMRIDYVRVYQPPDAINVGCDPDDYPTYDYIQNHLNIYHNMNLTTFEQGGYTFPKHKLTGC

SEQ ID NO: 106 - DNA, 2157 bp, Candida tropicalis
atggcaagagatctaacttacaatgctcccaaaataagatttgttgattctgaaggtcatgaagaaaattttcaattttcaaataataattcaacaacggatttaaacagtcaatcttcaactgtaaacaacaacaacaacaatcaaatacaaaatccattttctgatcaatcgaatacaaatagttcagattcaatacaatttaatgtttcaactccaacaaatgatagatttcctaataaccaacaacaacctataataaactatagtgaaacaaattcaatatattcagattctccaaatactactcaaagatcacaatttcaacctttattaaattcaacttatagacaatcttctccaattccagttccaatatcaaatgaaagtaacaacaaccttaataataataattcaataatgactcaaccttctggattagatagatatccaaaacatgttcaaccatcatcgtcaacttcacaacaaagtatttcttttcaaaatagcaatattacaaaagatattaatagttcaatagataataattcaaattattcttcatcactgttcactcaaaattcaagtaatgaattaatgggaatttatgataattcacaagattttagtccttttggtggatatcctgcaagttcatttcctttaagtatagatgaaaaagaacctgatgattatttacataatcctgatcctatccaagatgcagaatatgataaaaatcgattcatttatgatttgaaaaatatggataaaagatcaatgggtggtttaattggatttataatattattaattggtgcattggctatatttattgtattaccagttttcacatttgctcaatatggttcaaaaattacaactatgaaatatgaaatattaactgattatacttatccaatgttgagtgcaattagacaaaatttagttgatccagatactcctgaagatgcattgacttggatttcaaaagatggtgatgaatgggtattggtattttctgatgaatttaatgcaattggtagaactttttatgaaggtgatgatcaattttttacagctcctgattttcattatgctgctactcaagatttagaatggtatgatccagatgctgtaactactgaaaatggtactttgaatttaagattagacgcttttagaaatcataatttattatatcgttctggaatggttcaatcatggaatcaaatgtgtttcactcaaggtaaattagaatttctggcaagattacctggttatggtaatatcacaggattatggcctggtttatggtcaatgggtaatttaggaagaccaggatatttagcatcaactgaaggggtttggccttatacttatgattcttgtgatgctggtattaccccaaatcaaagttctcccgatggtatttcatacttaccaggtcaaagattaaataaatgtacatgtcctggtgaagatcatccaaatcctggtgttggtagaggtgctcctgagattgatgcattagaaggggaaattcatggaattattggtagagtatcacaatcattacaaattgcaccatatgatatttggtattatccagattatgattatatggaaattcataatagttcagttactttgatgaatacatatactggtggaccattccaacaagcagtttcaggagttacaatgttaaatacaacatggtatcaatttggagataatgcaaataattttcaaaaatatggatatgaatatttaaatgatgatgaaaatggatatttacgttggtttgttggcgatgatcctacttttacaatgcatgcaaaggcattacatccaaatggtaatattggttggagacaacttccaaaagaaccgatttctttaattatgaatttaggtatttcaaatagttgggcttatattgattggccaagtttaatgtttccttcaacaatgaggattgattatgttagagtttatcaacctcctgatgcaattaatgttggttgtgatcctgatgattatccaacttatgattatattcaaaatcatttaaatatctatcataatatgaatttgactacttttgaacaaggtggttatactttcccaaaacataaattaaccggatgttaa

SEQ ID NO: 107 - protein, 728 aa, Candida tropicalis
MASSSRDLTSNNPQYNRVNQIEDQDDDLNSAFNPRNPFADDINDPDSSGSVSSSSQQQQQEQQEQQHPQDPSSSSSPSPSTQQHFQESEYGKPFQAYSGYYSNGGSSQYLNQDLSNSENDSKLLSSAHFTTTSRDVSSSSTSENKLNPKSATEFDRYPSLAGSRVVSTTSLLSYNNLHSNSQTPRPIGSGSRDSTHSSVNNESTLSDRSNSPYATDFSPFGGYPASSFPLSIDEKESDDYLHNPDPVVDAEYDKNRFMYDLKNMDKRSLGGLIGLIVLLLGALAVFIVLPALTYSGATSPYRPEHYEILTDYTYPMLSAIRQSLVDPDTPEDALYKTSKDGDKWVLVFSDEFDVEGRTFYEGDDQFFTAPDIHYDATKDLEWYDPDASSTANGTLNLRMDAFKNHNLFYRSGMVQSWNQMCFTQGHLEISARLPNYGNVTGLWPGLWSMGNLGRPGYLASTDGVWPYSYDSCDAGITPNQSSPDGISYLPGQRLNKCTCPGEDHPNPGVGRGAPEIDVIEGEVMTDSTGRLENNGVASQSLQLAPMDIWYYPDYDYVEIYNSSVTTMNTYTGGPFQQALSATTTLNVTWYEFGDHAHNFQTYGYEYLNDDETGYLRWFVGQDPTLTVYSKALHANGNIGARPLSKEPMSLILNLGISNNWAYIDWNSLFFPVTMRVDYVRVYQPQDAINVGCDPDDYPTYDYIESHKDIYYNVNLTTFEERWLYFPKT

SEQ ID NO: 108 - DNA, 2187 bp, Candida tropicalis
atggcatcttcgtcaagagatttaacttcaaataatcctcaatataatcgagtgaatcaaattgaagatcaagatgatgatttaaattcagctttcaatccaagaaatccatttgctgatgatataaatgatccagattcttctggttctgtttcttcttcatctcaacaacaacaacaagaacaacaagaacagcaacatccacaagatccttcatcttcttcatctccatctccttcaactcaacaacatttccaagaatctgaatatggtaaaccattccaagcttatagtggatattattcaaatggaggaagttcacaatatttaaatcaagatttatcaaattctgaaaatgattcaaaattattatcaagtgctcatttcacaacaactagtcgtgatgtttcatcttcttcaacttctgaaaacaaattaaatccaaaatcagctactgaatttgatagatatccttcattagccggttcaagagttgtttctacaacttctttactttcttataataatcttcattccaattcacaaactcctcgtccaataggtagtggatctcgagattcaactcatagtagcgttaataacgaatcaaccctttctgatagatcaaatagtccttatgctactgattttagtccttttggtggatatcctgccagttcattcccattaagcattgatgaaaaagaatccgatgattatttacataaccctgatccagtagttgatgcagaatatgataaaaatagatttatgtatgatttgaaaaatatggataaaagatcattgggtggtttaattggtcttattgttttattacttggtgcattggctgttttcattgttcttcctgctttaacttattctggtgctactagtccttatcgtcctgaacattatgaaattttaactgattatacttatccaatgttgagtgcaattagacaaagtttagttgatccagatactcctgaagatgccctttataaaacttctaaggatggtgataaatgggtattggtattttctgatgaatttgatgttgaaggaagaactttttatgaaggtgatgatcaatttttcactgctcctgatattcattatgatgctactaaagatttagaatggtatgatccagatgcttcttcaactgcaaatggtactttgaatttacgtatggatgcttttaaaaatcataatttattttatagatcaggtatggttcaatcatggaatcaaatgtgtttcactcaaggacatttagaaattctggctagattaccaaattatggtaatgttactgggttatggcctggtttatggtcaatgggtaatttgggtagaccaggatatttagcttcaacagatggtgtttggccatattcttatgattcatgtgatgctggtattacaccaaatcaaagttctccagatggtatttcatatttaccaggtcaaagattaaataaatgtacatgtcctggtgaagatcatccaaatcctggtgttggtagaggtgctcctgaaattgatgttattgaaggtgaagttatgactgattctacaggaagattagaaaataatggtgttgcttctcaatcattacaattggcaccaatggatatttggtattatccagattatgattatgttgaaatttataatagttcagttacaactatgaacacatatactggtggaccattccaacaagcattatcagcaacaactacattaaatgttacatggtatgaatttggagatcatgcccataatttccaaacttatggatatgaatatttgaatgatgatgaaactggttatttacgttggtttgtaggtcaagatccaacattaactgtctattcaaaagcattacatgctaatggtaatattggtgcaagaccactttcaaaagaaccaatgagtttaattttaaatttgggtatttccaataattgggcttatattgattggaatagtttatttttcccagttaccatgagagttgattatgttagagtttatcaacctcaagatgcaattaatgtaggttgtgatcctgatgattatccaacttatgattatattgaaagtcataaagatatttattataatgttaacttgactacttttgaagaaaggtggttatactttcccaaaacataa

SEQ ID NO: 109 - protein, 500 aa, Chaetomium globosum
MDREGDYAREGQAYYGRSVTGGPAPSAATTAATTPQYRPGTPNTDNAGRNPFGDGLESQASVRSAIPTGASTNPFASPNNSRPPSSYGSSSARATGMFDERSQRYFHSRRIRKEDIEKPWLQKTHPKEKWVTILPIIGILIGLGISGFLIWDGINSVIKHKYCIVLDDDFASGLSSSTWTKEVEVGGYGNGQFDWTTGGDENVFVKDGHLVIRPELTDSALIEKDTEINLLEDGTCTSDRPFNCITATNTTTGNATIVQPIKSGRIHTKGGVRIKYGRVEVTARLPRGDWLWPAIWMLPERDTYGPWPASGEIDILESRGNDWKYEQGGNDIAASALHWGPDPANDAWWRTNNKRQALKTTYADGFNTFGLEWSQKYLFTYVNSRLLQVMYTNFDKPMWKRGNFPEANANGTRLNDIWSETGRSNTPFDQYFYLIINLAVGGSNGWFEDGKSEKPWLNGSPNAKKDFWEARDTWLPTWTKPELEIKHVKIWQQCNGDEEL

SEQ ID NO: 110 - DNA, 1503 bp, Chaetomium globosum
atggaccgtgaaggcgattacgcccgcgagggccaagcctactacggccgctccgtgactggtggtcccgccccctcagcagcgaccactgctgccaccacgcctcagtaccgccctggcacccccaacacagacaacgccggccgcaacccctttggcgatggtctcgagtcgcaggcctctgttcgctccgccattcctaccggtgccagcacgaatccctttgcgagccccaacaactctcggcccccgtcgagctacggctcatctagtgcccgcgccacgggcatgttcgatgagcgctcgcagcgttacttccactcccggagaatccgcaaggaggacattgagaagccatggctccagaagacgcaccccaaggagaaatgggtcaccattctccccatcattggcattctgatcggtcttggcatctccggcttcctcatctgggacggcatcaacagcgtcataaaacacaagtactgcatcgtgcttgacgacgacttcgccagcggcctcagctccagtacctggaccaaggaggtcgaggttggcggctacggcaatggccagtttgactggaccaccggtggtgacgagaacgtcttcgtcaaggatggccatcttgtcatccgacccgagctcactgactcggccctcattgagaaggacaccgagatcaacctgctcgaggacggcacctgcacgtcggacaggcccttcaactgtatcactgccaccaacacaactacgggcaacgccaccattgtccagcccatcaaatctggtcgtatccacaccaagggcggcgttcgcatcaagtatggccgtgtcgaggtcactgcccgtcttcccaggggcgactggctgtggcccgccatctggatgttgcccgagcgcgacacgtacggaccctggcccgcgtccggcgagattgatatcctcgaatcccgcggcaacgattggaagtacgagcagggcggcaatgacattgccgcatcagcgctgcactggggccccgatccggccaacgacgcctggtggcgcaccaacaacaagcgtcaggccctcaagacgacctacgccgacggcttcaacacctttggcctcgagtggtcccagaagtacctcttcacctacgtcaacagccgtctgctgcaagtcatgtacaccaattttgacaagcccatgtggaagcgcggcaacttccccgaggccaatgccaacggtacccgtctcaatgacatttggtccgagacgggacgctccaacacgccctttgaccagtacttctacctcatcatcaaccttgcagttggcggtagcaacggctggttcgaggacggcaagtccgagaagccctggctcaacggctctcccaatgcgaagaaggacttctgggaggcccgtgacacttggctgcccacatggaccaagcccgagcttgagatcaagcacgtcaagatctggcagcagtgcaacggcgacgaggagctctga

SEQ ID NO: 111 - protein, 488 aa, Colletotrichum gloeosporioides
MDQDSYNQQYFSRQVAGQPSQATTAAGTPMRPGTPETNNSRNPFNDGVESQASQRPGMGTNPFGTPAVSRPASSFGSSSAIGTRFDERSQRYFHSRRIRKEDVEKPWLDKADPKEKWVTIIPIVGILLGLAISGFLIWDGIHSVVKHQYCPVLIEDFSSGNLDSNVWTKEVNVGGFGNGEFEWTTADAENIFFQDGALVIKPTLTDNTMIEKDTVVDLLKDGTCTSDKFSDCVAATNTTAGNSTIVPPVKSGRLNTKKGATIKYGRVEVVAKLPKGDWLWPAIWMMPVEDTYGSWPASGEIDIMESRGNNWTYEQGGDNIMSSALHWGPDQANDAWWRTNNKRQALHTTYGDNFNTFGLEWSQKYLFTYVNSRLLQVMYTNFDEPMWQRGDFPQANSNGSRLTDVWSQTGRANTPFDQKFYLILNVAVGGTNGWFEDGKSNKPWLNTSPNAKKDFWTATDQWFPTWTQPEMTIKKVSMWQQCDGNEEL

SEQ ID NO: 112 - DNA, 1467 bp, Colletotrichum gloeosporioides
atggaccaggattcatacaatcagcaatacttctcccgccaggtcgccggtcagccttcgcaagcgaccaccgctgccggcactcctatgcgcccaggcacccccgagaccaacaacagccgcaatcccttcaacgatggtgtcgagtctcaagcatctcaacgtcccggcatgggcacaaacccctttggcacaccagccgtatcccgtcccgcatcaagcttcggctcctccagcgccattggcacccgcttcgacgagcgttcccagcgctacttccactcaaggcgcattcgcaaggaggacgtagagaagccctggttggacaaggccgatcccaaggagaaatgggtcacaattattcccatcgtcggtatcctgctcggtctggccatctccggtttcctcatctgggacggtattcacagtgtcgtcaagcaccaatactgccctgttctcattgaggacttcagctctggcaatcttgacagcaatgtttggaccaaggaggtcaacgttggcggcttcggcaatggcgaattcgagtggaccaccgccgacgccgagaacatcttcttccaggatggtgccctcgtcatcaagcccactctcactgacaacaccatgattgagaaggacactgtcgttgatctgctcaaggatggaacctgcacgtcggacaagttctccgactgtgttgctgccaccaacactaccgctggaaactccaccatcgtccctcctgtcaagtctggccgcctcaacaccaagaagggtgccaccatcaagtacggccgcgtcgaggttgtcgctaagctccctaagggcgactggctctggcctgctatctggatgatgcccgtcgaggacacgtacggctcctggcccgcgtctggcgagattgacatcatggagtctcgcggcaacaactggacctacgagcagggtggcgacaacatcatgtcttctgctctgcactggggtcccgaccaagccaacgacgcttggtggagaaccaacaacaagcgccaggccctgcacaccacctacggcgacaacttcaacaccttcggcctcgaatggtcgcagaagtacctcttcacctacgtcaacagccgtctgctgcaggtcatgtacaccaacttcgatgagcccatgtggcagcgcggtgacttcccccaggccaactccaacggcagtcgcctgacggacgtctggagtcagactggccgtgccaacacgccctttgaccagaagttctacctcatcctgaacgtcgccgtcggtggcacgaacggatggttcgaggacggcaagtccaacaagccctggctcaacaccagccccaacgccaagaaggacttctggacggctaccgaccagtggttccccacctggacgcagcccgagatgaccatcaagaaggtctccatgtggcagcagtgcgacggtaacgaggagctgtaa

SEQ ID NO: 113 - protein, 477 aa, Colletotrichum graminicola
MDQDQGYYSRSAAAGTPLRPSTPNTESSRNPFGDGIESQAASQRGPVTTNPFGTPAVSRPASSFGSASALGARFDERTNRYFHSRRIRKEDIEKPWLNKADPKEKWVTIIPIIGILVGLVVSGFLIWDGVRSVVKHKYCPVLIEDFSSGALDTNVWTHEVQVGGFGNGEFEMTTADNENVFIKDGNLVILPTLTDSALIEKDNVIDLLKDGTCTSDQPSACIAATNTTAGNSSIVPPTRSGRINTKKGATLKYGRVEVVAKLPKGDWLWPAIWMMPVQDTYGAWPLSGEIDILESRGNNWTYAQGGNNIASSALHWGPDHANDAWWRTNNKRQALHTTYADGFNTFGLEWSQKYIFTYINSRLLQVLYTNFDEPMWQRGDFPQANSNGTRLEDVWSQTGRSNTPFDQKFYLIINVAVGGTNGWFQDGQSGKPWLDSSPNAKKDFWNARDQWLPTWTSPELSVSKVSMWQQCDGDEEL

SEQ ID NO: 114 - DNA, 1434 bp, Colletotrichum graminicola
atggatcaagaccagggctactactcccgctctgcggccgctggcactcctctccgcccaagcactcccaacacagaaagcagccgcaacccgtttggcgacggtatcgagtctcaggcggcttcccaaagaggcccggtgaccacgaacccgttcggtacacccgccgtctcgcgtcctgcctcgagtttcggctcagccagcgcccttggagcccgcttcgacgagcgcaccaaccgttacttccactcgagacgaatccgtaaggaggacatcgagaagccctggttgaacaaggcagaccccaaggagaaatgggtcaccatcatccccatcatcggcatcctcgtcggccttgtcgtctcgggcttcctgatctgggacggtgtccgcagtgtcgtcaagcacaagtattgccccgtgctcattgaggacttctcctcgggcgccctcgacaccaacgtctggactcatgaggtgcaggtcggcggctttggcaatggcgaattcgagatgaccaccgcagacaatgagaacgttttcatcaaggatggcaacctcgtcattcttcctactctcactgactcggctcttattgagaaggacaacgtgattgacctgctcaaggatggaacgtgcacttcagaccagccctcggcttgcattgccgccaccaacactactgccggcaactcttccattgtcccccccaccaggtcgggccgcatcaacaccaagaagggcgctaccctcaagtatggtcgcgttgaggtcgttgccaagttgcccaagggagactggctctggcccgccatctggatgatgcccgtccaggacacttacggtgcctggcctctttctggcgagattgacatcctcgagtcccgcggcaacaactggacttatgcacagggcggtaataacatcgcctcgtcagctctacactggggccccgaccatgccaacgacgcttggtggagaacgaacaacaagcgtcaggccctgcacacgacgtatgctgatggcttcaacacgttcggtctcgagtggtcccagaagtacatcttcacctacatcaacagtcgtctgctccaggttctctataccaactttgacgagcccatgtggcagcgtggtgacttccctcaggccaactccaacggcacccgcctcgaggacgtctggagccagactggccgctccaacacgcccttcgaccaaaagttctacctcattatcaacgtcgccgttggaggtaccaacggctggttccaggacggccagtctggcaagccatggcttgattccagccccaacgccaagaaggacttctggaatgcccgcgaccagtggcttcctacgtggacgtcgcctgagctctctgtctccaaggtttccatgtggcagcagtgtgacggcgatgaagagttgtaa

SEQ ID NO: 115 - protein, 488 aa, Colletotrichum higginsianum
MDQDQYGQGYYSRPVAGMPSTATTASATPNRPGTPNTENSRNPFGDGIESQASQRGPVGTNPFGTPAVSRPASSFGSSSAIGARFDERSQRYFHSRRIRKEDVEKPWLDKSDPKEKWVTIIPIVGIFIGLAVSGFLVWDGIRSVVKHKYCPVLMEDFASGSLDSNVWTKEVEVGGFGNGEFQMTTADDENVFIKDGNLFIRPTLTDSALIEKDTVIDLLKDGTCTSDQPSSCIAATNTTAGNSSIVPPTRSGRINTKKGATIKYGRVEVVAKLPKGDWLWPAIWMMPVDSTYGPWPLSGEIDILESRGNNWTYSQGGNNIASSALHWGPDQANDAWWRTNNKRQALHTTYADGFNTFGLEWSQKYIFTYINSRLLQVLYTNFEEPMWQRGDFPQTNSNGSRLEDVWSQTGRANTPFDQRFYLIINVAVGGTNGWFEDGKSGKPWVGTSPNAKKDFWQARDQWLPTWTSPELTVSKVSMWQQCDGNEEL

SEQ ID NO: 116 - DNA, 1467 bp, Colletotrichum higginsianum
atggaccaggaccaatacggccagggctactactcccgccctgtagccggaatgccctcgacagctaccacggcctcggccacccctaatcgccccggcactcccaacacagaaaatagccgcaacccctttggcgacggcatcgagtcacaggcttctcagaggggccccgtcggcacgaatccattcggcacccccgccgtctcccgtcctgcctcgagcttcggctcgtccagcgccatcggcgcccgttttgatgaacgctctcagcgctacttccactcgaggcgcattcgcaaggaagacgtcgagaagccttggttggacaagtccgaccccaaggagaaatgggtcaccatcatccccatcgtcggcatcttcattggcctcgccgtctcgggtttcctcgtctgggacggtatccgcagcgtcgtcaagcacaagtactgccccgtgctcatggaggactttgcctcgggcagcctggactccaacgtctggactaaggaggtcgaggtcggcggcttcggcaatggcgagtttcagatgactaccgccgacgacgagaacgtcttcatcaaggacggcaacctcttcattcgtcccactctcacagactcggccctcattgagaaggacaccgtcattgacctgctcaaagatggcacttgcacctctgaccagccctcgtcttgcatcgctgccaccaacaccacggccggcaactcgtccattgtgccacccaccaggtccggtcgcataaacactaagaagggtgcaaccatcaagtacggtcgcgtcgaggtcgtcgccaagctgcccaagggcgactggctctggcccgccatctggatgatgcccgtcgatagcacctacggaccttggccgctgtctggcgagattgacattctcgagtcccgcggcaacaactggacctacagccagggaggcaacaacatcgcctcgtccgctctccactggggccccgaccaggcaaacgacgcctggtggcgcaccaacaacaagcgtcaggccctgcacacaacgtacgccgacggttttaacactttcggtctcgaatggtcccagaagtacatcttcacctatatcaacagccggctgctccaggttctctacacaaacttcgaggagcccatgtggcagcgcggcgacttcccccagaccaactccaacggctcccgtctcgaggacgtctggagccagacgggccgcgccaacacgccctttgaccagcgtttctacctcatcatcaatgtcgctgtcggaggcaccaacggctggttcgaggacggcaagtcgggcaagccttgggttggcaccagccccaacgccaagaaggacttttggcaggcccgcgaccagtggcttcccacgtggacgtctcccgagctcactgtctccaaggtctccatgtggcagcaatgcgacggcaacgaagagttgtaa

SEQ ID NO: 117 - protein, 488 aa, Colletotrichum orbiculare
MDQDQYNQAYYARPQAGMPSTVTTATGTPLRPGTPNTENSRNPFGDGIESQASQRPPLGTNPFGTPAVSRPASSFGSSSAIGNRFDERSQRYFHSRRIRKEDIEKPWLDKADPKEKWVTIIPIIGILVGLGISGFLVWDGIRSVVKHKYCEVLIEDFTSGNLDSNVWTKEVNVGGFGNGEFQWATADQENVYIKDGNLVIHPTLTDNTMIERDTVVDLLKDGTCTSDKYYDCVAATNTTAGNSTIVPPVKSARLNTKKGATIKYGRVEVVAKLPKGDWLWPAIWMMPVEDTYGAWPASGEIDIMESRGNNWTYEQGGNNIISSALHWGPDQANDAWWRTNNKRQALHTTYGDGFNTFGLEWSQKYLFTYVNSRLLQVIYTNFDEPMWQRGDFPQTNANGSRLTDVWSQTGRANTPFDQKFYLILNVAVGGTNGWFDDGKSGKPWVGTSPNAKKDFWKATDQWFPTWTQPEMTISKVSMWQQCDGNEEL

SEQ ID NO: 118 - DNA, 1467 bp, Colletotrichum orbiculare
atggaccaagaccagtacaaccaggcctactacgccaggccacaggcaggaatgccctcgaccgtcaccacagccaccggcactcctctgcgcccaggcactcccaacacagagaacagcaggaaccctttcggcgacggcatcgagtcgcaggcttcccaacgccctcctctgggcaccaacccgtttggtactcctgcagtttctcgtccagcatccagctttggctcttccagcgccattggtaaccgcttcgacgagcgttcccagcgttacttccactcgagacgcattcgcaaggaggacattgagaagccctggctcgacaaagccgacccgaaagagaaatgggttactattattcccatcatcggtatccttgtcggtctcggtatctctggcttcctcgtctgggatggcattcgcagtgtcgtcaagcacaagtactgtgaggttctcattgaggatttcacctcgggcaacctcgacagcaacgtatggaccaaagaggtcaatgtcggcggctttggcaatggcgaattccagtgggctaccgcagatcaggagaacgtctacatcaaggatggcaacctcgtcatccaccctactctcactgacaacaccatgatcgagagggacaccgtcgtcgacctgctcaaggatggaacctgcacatcggacaagtactacgactgtgtcgctgccacaaacaccaccgccggcaactccaccattgtccctcctgtcaagtcggctcgtcttaacaccaagaagggcgccaccatcaagtacggacgtgtcgaggtggtcgcaaagctgcccaagggtgactggctttggcccgccatctggatgatgcccgtcgaggacacgtacggagcctggcccgcctcgggcgagatcgatattatggagtcccgcggcaacaactggacctacgagcaaggcggcaacaacattatttcgtccgcccttcactggggccctgaccaggccaacgacgcctggtggaggactaacaacaaacgccaggctctgcacaccacctatggcgacggcttcaacacctttggcctcgagtggtcccagaagtacctcttcacctatgtcaatagccgcctgctgcaagtcatttacaccaacttcgacgagcccatgtggcagcgcggcgactttccccagaccaacgccaacggctcccgcttaacggatgtctggagtcagacgggtcgcgctaacacccccttcgaccaaaagttctacctcatcctcaacgttgccgtcggaggcaccaacggctggtttgatgatggcaagtctggcaagccctgggtgggcaccagccccaacgccaagaaggacttttggaaggccaccgaccagtggttccctacctggacccagcccgagatgaccatcagcaaggtctccatgtggcaacagtgtgacggcaatgaggagctgtaa

SEQ ID NO: 119 - protein, 491 aa, Cordyceps militaris
MDHQQHDRYAGSYNSPNAQPYSGNVSSNITPPRSGTPNTEGGPNPFGDTPEPVANQRLAATTGTNPFVSPAVSRPASSFGSSSAIGPRFEERAQRYFHSRRVAKGDVEKPWLEKKDKKEKWVTIIPVIGILVGLGISGFLVWDGLRSVIHHKYCPLIDDNFDNGFDSNIWSKEVQVGGFGNGEFEMTTPGDENVYVDGGNLVIKATLQDADKMEKTTTIDLLKDGTCTSTNFYDCVAVTNTTAGNSSVVPPVKSGRITTKKGATLKYGRVEVTAKLPQGDWLWPAIWMMPVKDTYGPWPASGEIDIMESRGNNWTYAQGGNNIVSSALHWGPDPANDAWWKTNNKHKILRGNFGDDFNTFGMEWSQKYIFTYVNTRLMQVLYTNFNKPMWQRGAFPQTTGNGTRLADVWSQTGRKNTPFDQDFYLIINLAVGGTNGWFEDNKSLKPWVNGSPNSKKDFWNAREDWQATWKQPQMEIKRVLMLKQCDGNEEL

SEQ ID NO: 120 - DNA, 1476 bp, Cordyceps militaris
atggatcatcagcaacacgaccgctacgccggtagctataatagccccaacgcccaaccctactcgggcaacgtctcctccaacatcacacctccccgatcaggaacgccaaacactgaaggtggtcccaacccctttggcgatactcccgagcctgtcgccaaccagcgcctggccgccaccactggcaccaacccctttgtcagccctgccgtctcgcggcctgcctccagctttggctcctccagcgccattgggccgcgatttgaagagcgcgcccagcgctacttccactcgcgccgcgtggccaagggtgacgttgagaagccctggctggagaaaaaggacaagaaggagaaatgggtcaccattattcccgtgattggcatcctcgttggtctcggaatctctggcttcctagtctgggatggtctccgcagtgtcatccaccacaagtactgcccgctcatcgatgacaacttcgacaatggcttcgacagcaacatctggtccaaagaggtccaggtcggtggatttggtaacggcgagtttgaaatgacgactcctggtgacgaaaatgtctacgttgacggcggcaacctcgtaatcaaggccaccctccaggatgccgacaagatggaaaagaccacgaccattgatctcctcaaggatggcacctgtacctcaaccaacttttacgactgtgtggccgtcaccaacacgacggccggcaactcgagcgtggtcccacccgtcaagtctggtcgcatcaccaccaagaagggcgccaccctcaagtatggtcgtgttgaggtcacggccaagctccctcaaggcgactggttgtggcctgccatttggatgatgccagtcaaggacacgtacggaccgtggcctgcttcgggcgagatcgacattatggagtcgcgcggcaacaactggacgtatgcgcaaggtggcaacaacattgtctcgtcggccctgcactggggccctgatcctgccaacgacgcctggtggaagacgaacaacaagcacaagattcttcggggcaactttggcgacgacttcaacacatttggtatggagtggtcgcaaaagtacatttttacctacgtcaacacgcgactgatgcaggtgctctacaccaacttcaacaagcccatgtggcagcgcggggctttccctcagacgacgggcaacggcacgcgcctggccgacgtttggagccagacggggcgcaagaacacgccatttgaccaagacttttacctcatcatcaacctggctgtgggtggcaccaacggttggtttgaggacaacaaatcgctcaaaccgtgggtcaatggctctcccaactctaagaaggacttttggaatgcccgcgaggactggcaagcgacgtggaagcagcctcagatggagattaagcgggtgctgatgctgaagcagtgcgacggtaacgaggagctgtaa

SEQ ID NO: 121 - protein, 622 aa, Cryptococcus neoformans
MRSSQRQGREPLLQSAQNPGQSQRLSDSSFTSFDHPGMSHRGSHNDASVNSYGSSSSRFGPTASLASGTSAAVVVGSTGGFSDELPQQAPPQAQMGNWHDVDDLDDHLHTFTSQDRKDLASPFDITSARGWANALTLGILAGGGVMLFAGYPIISFYYGDSNSSGANTSGYNLGGINSSGQYPEIPGLPTLIDADTPEWAYKRTGFDGDEWTLVFSDEFNKEGRTFFEGDDPFWTGMDIHYWPTGDFEWLDPSAVTTADGHLVITMTQEPIHDLNFKSGMLQSWNKLCFNKHAYFEFSASLPGQTMYGGFWPGIWTMGNLGRPGYGASTEGMWPYTYDSCDVGTLPNQTYVNGTGPIATLTTGADDSPLSYLPGQRCSACTCPGEDHPGPVNTKGRAAPEIDIVEAQIIVAESRGEVSQSFQVAPYDDHYQSDNSSKNFKHYDTDLTYWNTYLGGPFQQAVSSLTRLPRNIYWDQPGDSKQFAVFAMEYQAFPEARDQGYITWWADNKTSWTMYADAVAENPRTGIGRRIIPEEPMAMIVNLHMSNNFQAVDFANLKWPNYFRIDYVRVYQKPDQISIGCDPEDYPTADYIARHAEVYSNPNLTTWEAAGYTFPKSSMKGDC

SEQ ID NO: 122 - DNA, 1869 bp, Cryptococcus neoformans
atgcgatcctctcaacgacagggccgtgaacctttactccaatccgcccagaaccccggtcaatcacagcgcctatccgactctagctttacatctttcgaccacccaggtatgtcccaccgcggatctcataacgatgccagcgtgaactcgtacggctcgtcatccagcagattcgggccaacggcttcccttgccagtggcacctcagcagctgtagtggtcggcagcacgggaggcttctcagatgaactccctcagcaagccccaccacaagcacaaatgggaaactggcacgatgtcgatgatcttgatgaccatctgcataccttcacatcgcaggatcgcaaagaccttgcttcaccgttcgatattacctctgcgcgtggctgggcgaatgctcttactcttggtatactagccggtggaggtgtcatgctgtttgccggataccctatcatctcgttttattatggcgacagcaactcttctggtgccaatacctcgggttataaccttggaggaatcaactctagtggccagtaccctgagataccaggcctcccgaccttgattgatgcggacaccccagaatgggcttacaagagaaccggatttgacggggatgaatggacgttggtgttttcagacgagttcaacaaggagggtaggacgttttttgaaggagatgatcccttttggactggcatggatattcactattggcccactggagattttgaatggcttgatccctctgcggtgacaacggccgacggtcatttggtcattaccatgacacaagaacccatccacgatctcaactttaagtctggcatgctccaaagctggaacaagctttgcttcaataaacatgcttattttgagttttcggcaagtttgcctggccaaacaatgtacggtgggttttggcctggtatctggactatggggaatttgggtagaccagggtacggtgcctcaacagaagggatgtggccatatacctacgacagttgcgacgttggtaccctccccaatcagacatacgtgaacggcaccggtcccattgcgacccttaccaccggcgctgatgattcacctctttcctacctccccggccaacgatgttccgcctgcacttgtcctggagaagaccatcccggtcctgtgaataccaaaggccgtgctgctccggaaatcgatatcgtcgaagcgcaaatcattgtcgccgaatccagaggagaagtatctcagtcgttccaagtcgctccttacgatgatcactatcagtctgataattcctccaagaacttcaagcattacgacacggatttgacatattggaatacgtatttggggggtcctttccagcaggcggtatccagtttgacgagacttccaaggaatatatactgggatcagccgggagatagtaagcaatttgccgtgtttgctatggaatatcaagccttcccagaggcaagggatcaggggtatatcacttggtgggcagataacaagactagctggacaatgtatgcggatgcagttgcagagaacccgaggacgggtatcggacgaagaatcatcccagaggaacctatggctatgattgtcaatttgcatatgtcaaacaactttcaagcagtcgactttgcgaatttgaaatggccaaactactttaggattgattatgtgagagtgtatcaaaaaccagaccagatctctatcggatgcgatcccgaagattatcccactgcggactatatcgcgcgacatgcagaggtatattctaacccaaatctcaccacctgggaagcagccgggtatactttcccaaaaagtagtatgaagggcgactgctaa

SEQ ID NO: 123 - protein, 619 aa, Cryptococcus neoformans
MQYGSQSPTLGREPLLASVQNPGMSQRLSESSFTSYDNQSSMSHRVGANSPTGGSYASFSSGNRFGPTAHLNPGPVAGVGEAGALPSGTYAQGPIDDDDDMDDHLHTFTAAEKKDLSTPFNISSWRGWANALTLAVLAGGGVMLFAGYPIISFYYGDNNSSGSNTSGYNLGGINASGQYPSITGMPSLIDPDTPESLYTRTGFDGNEWTLIFSDEFEKDGRTFFEGDDPFWTGVDFNYWPTGDLEWYDPSAITTADGKLVITITQEPIHNLNFKSGMLQSWNKFCFNKNAYIEFSASLPGTSGIGGFWPGVWAMGNLGRPGYGASTEGMWPYTYNSCDVGILPNQTWVNGTGPDAALTSGSNGGQLSELPGMRTPSCTCEGEDHPGPDVTVGRSAPEIDIIEAQIIISENRGEVSQSFQTAPFDDFYQWDNTSTSNYKQYDTDLTYWNTYLGGSYQQSVSSLTRVPRDIYYNQPGGGGEFAMFGMEYDSAPGHVEDGYVTWYSDNKTSWTMYADALAANERVGLGRRLIPQEPMSLIVNLGLSFNFQPVDFDHLTFPNYLRIDYFRVYQRSDSISVGCDPDDYPTADYIAKHAEVYSNANLTTWAQAGNTFPKNELTGC

SEQ ID NO: 124 - DNA, 1860 bp, Cryptococcus neoformans
atgcagtacggcagccaatcgcccactctaggacgtgaacccctgctcgcgtccgtccagaaccctggcatgtcccagcgtctctctgaatcatcctttacttcatacgataaccaatctagcatgtctcaccgtgtcggcgcaaactctcccactggcgggtcttatgctagtttttcttctgggaaccgatttggtcccacagcacatctcaaccctggtcctgttgcgggcgtcggcgaggcaggtgcgttgcccagcggcacatatgcccaggggccgatagatgacgacgatgatatggacgatcatctgcatacctttaccgcagctgagaagaaggatctcagcacgccgtttaatatcagttcctggcgaggatgggccaacgcattgactttggctgttttggcaggcggcggtgtaatgcttttcgcgggttatcctatcatatcattctattacggtgataacaactctagcggatctaacacatccggttacaacctcggtggtatcaatgccagtggacaatacccttctatcactggtatgcccagtctgatcgacccagatacacctgagtccttgtacacaagaactgggttcgacgggaatgagtggacgttgatattttcggacgagtttgaaaaagacggaagaacattctttgagggtgatgatccgttctggacaggtgtcgatttcaattattggccaactggtgacctggaatggtacgatccttctgccatcactacggccgatggaaaactagtcattactattactcaagaacccatccacaatctcaacttcaaatctggtatgctccagtcttggaacaagttttgtttcaacaaaaatgcgtatattgaattctctgcttctttgcctggtacgagcggtattggtggtttctggcctggtgtttgggctatgggtaacttgggacgacccggttatggtgcttctactgaaggaatgtggccatacacttacaactcttgcgacgtcggtattcttccgaaccaaacttgggtcaatggtacaggtcccgatgccgcactcacaagtggttccaacggcggtcagctctctgagcttcccggtatgcgtaccccgtcatgtacctgcgagggcgaagaccatccaggtccagacgttaccgttggtcggtcggctcctgagatcgatatcattgaagcacagatcatcatttccgagaaccgaggagaagtctcccagtcattccagaccgcgccctttgacgacttctaccaatgggacaacacttcaacaagcaactacaagcaatatgacactgacttgacatattggaacacatacctcggtggttcataccaacaatctgtctcttctcttacccgtgtacccagagatatctattacaatcagcccggaggtggtggcgaatttgccatgtttggtatggaatacgattccgctcccggtcatgtggaagatggatacgtaacttggtacagcgacaacaaaaccagttggaccatgtatgcggacgcccttgctgcgaatgagagggtcggtctcggaaggcgactcattccccaagaacctatgtctctgatcgtcaaccttggtctttcgttcaacttccaacctgtcgactttgatcatctcactttccccaactaccttcgcattgattacttccgtgtgtaccaacgatcggacagtatctctgttggatgtgaccccgatgactaccccactgcagattatattgccaaacacgcagaggtatactctaatgcgaatttgacgacttgggcgcaagcaggcaataccttcccaaagaatgagttgactggatgttaa

SEQ ID NO: 125 - protein, 588 aa, Cryptococcus neoformans
MSRYNDYRRYTRSSDSSSLPTTIQQYGPSASSTKPTDRLLPPARLSVSSASLDSRAKLAEVGSGASGEWGLMMTGPEEDDWMHNPDPIKNHNYDRGTIFTPRGLINVGCLVMLILCLVTLFAGYPIITHFTDTQIKTNGAYNIGGINSTGQVPLISNIPTVIDSDTPENVYTRTGFDGKTYSLVFSDEFEKEGRTFFPGDDPFWTGVDIHYWPTGDFEWYDPAAITTKDGHLVITLNQENIHDLNFRSGMLQSWNQICFQYSIYIETSVSLPGNNKVGGFWPGVWMMGNLGRPGYGATTDGTWPYSYDSCDYGTLANQTNPDGTGPEGALTSGSDDGPISYLPGQRMSSCTCQGEDHAGPDVTYGRGVPEIDVLEGQIDLSVNIGQVSQSAQFAPFDKGYEYLNTSKGAIQYDTDLTMWNSYKGGTYQEAVSSLTYIDSDNYVGTSGGFGIYGFEMFSDPNDRGSGYITWVANGKKSWTMYPAAVGPLSSMNIGQRLISEEPMAMVINFGMSNNFQAIDFSHLAFPSEMHIDYVRVYQRSEGRMGCDPDDRPTAAYIEKHANAYNNANFTTWAMAGYTMPKNSLIDSC

SEQ ID NO: 126 - DNA, 1767 bp, Cryptococcus neoformans
atgtctagatataatgattataggaggtatacacgatcctcagatagcagtagcctgcccacgaccattcaacaatatggtccttcggcgtcttcaacaaagccgaccgaccgccttttaccaccagcaagattgagtgttagctcagcaagccttgatagcagagcaaaattggctgaagtgggatcaggagcttcgggagaatgggggctgatgatgaccgggccagaggaggatgactggatgcacaatccagatcccataaaaaatcataactatgatcgaggaacgatatttacaccacgtggtctcattaacgtcgggtgcctcgtcatgcttattctgtgcctggtgacccttttcgcagggtacccgatcatcacccacttcacagatacccagatcaagacaaacggcgcatacaacatagggggtatcaactcgactggccaggtacctcttatatcgaacatccctactgtgattgatagcgatacaccagagaacgtgtacacgcgaacaggtttcgacgggaagacatatagtttggtcttttcggatgagtttgaaaaggaagggagaacttttttccctggtgacgatcctttttggactggcgtcgatatccactactggccaacaggcgattttgaatggtacgaccctgcagcaatcaccactaaagatggtcatctcgttatcacactcaatcaggaaaacattcatgacctaaacttccgttccggtatgcttcagtcgtggaatcaaatatgtttccagtactcaatctacattgaaacctccgtttctttaccgggcaataacaaagttggcgggttttggcccggtgtatggatgatgggtaatctcgggagaccagggtacggagccacgacagacgggacatggccttactcatatgattcatgcgattacgggacgctggcgaaccagacaaatccagacggcactgggccagagggagctttgacatctgggtcagacgatggtcccatttcttacctgccgggacagagaatgtcttcgtgcacttgtcaaggagaagatcatgcagggccagatgtgacttatggacgtggcgtaccagagattgatgtcctcgaaggacaaatagacttgtctgttaacataggccaagttagccaaagtgctcagttcgccccctttgacaaaggatacgaatacctcaacacctctaaaggagctattcaatacgatacagacctcacaatgtggaactcgtacaaaggcggaacgtatcaggaagcggtatcatctttgacttatatcgatagcgataattacgtcgggactagtggtgggttcggtatatatgggtttgagatgtttagcgatcccaacgatagaggttccggttacatcacatgggtcgcgaacggtaagaaatcatggacgatgtatcccgccgctgtaggacccttgtcctctatgaatatcggtcaacgcctgatatctgaggagccaatggcaatggtcataaattttggcatgtccaacaattttcaagctatcgattttagccacctcgcctttccctcggagatgcacattgactatgtgagagtgtatcagcggtcagaaggaaggatgggctgcgatcccgatgatcgaccaactgctgcttacattgagaaacacgcgaatgcgtataataacgctaattttacgacctgggctatggctggttatactatgcctaaaaactcacttattgactcttgttaa

SEQ ID NO: 127 - protein, 600 aa, Cryptococcus neoformans
MLEHNDRYASGTMISGERKHAFASAIAARQSIFAPLSKYECYTPRPGPSRTDSGISYTSTNTDSSLKDPKHVNPMEWKIVTVDSEDDVEDDDWMHNLDPKNDKKYDRGTIFTCRGLLNIGCLTILLLCFLTLFLGYPVYTYYTDEHQSTNGAFNLGGINSTGQIPYIENFVMVIDKDTPESAYTRTGFDGEAYSLVFSDEFEKEGRTFFPGDDPFWTGVDLHYWPTGDLEWYDPSAVTTRDGKLVITMTQEPIHDLNFKSGMIQSWNQICFQYSVYIEVSLSLPGNDKVVGFWPGVWMMGNLGRPGYGATTDGTWPYSYDSCDFGTLANQTNPEGTGPKAALTSGTDGGPISYLPGQRMSACTCKGEDHAGPDVSYGRGVPEIDVLEATVDLTVKRGAVSQSAQMAPFDEGYQYDNSSKGGIIYDTKNTQYNAYLGSIYQEAVSSLTYIDHENYVGTSGGFGVYGFEYFSNPEDRGSGHITWVANGKKSWTMFPDAVGAVESMDIGQRLISEEPMAMIINFGMSESFQPVDFNHLITPMEMLVDYVRVYQRSEGRVGCDPKDRPTAAYIENHINAYSNPNLTTWEAAGYTMPKNSLIDTC

SEQ ID NO: 128 - DNA, 1803 bp, Cryptococcus neoformans
atgctagagcataatgacagatatgcatcagggacgatgatatccggggaaagaaagcatgcctttgcttcagcaattgctgcacgtcaatccatttttgcgccattgtcaaaatatgagtgctatacacctcgtccggggcctagccggacagacagtggcatcagctatacaagtacaaatacggatagcagcttgaaagacccgaagcatgttaatcctatggaatggaaaattgtgacggtcgattcagaggatgatgtagaggacgatgattggatgcacaatcttgatcctaaaaatgacaagaagtatgaccgcggaacgatttttacatgccgagggttattgaacatcgggtgtcttaccatacttctcctttgtttcttgactcttttcctcgggtatccggtctacacatactacaccgacgaacatcagagtaccaatggcgcgttcaatctcggaggcatcaactctactggacaaatcccatatatcgagaactttgttatggtgatagacaaggatacccctgagagcgcatatacaagaacgggctttgacggggaggcgtacagtttggtattttcggatgaatttgagaaggaaggtagaacattcttcccaggcgacgatcctttctggactggtgttgatctccactattggcccacaggtgatctagaatggtatgacccatcagctgtaacaaccagagacggaaaactcgtcatcactatgacacaagaacccatccacgaccttaatttcaagtccgggatgattcaatcatggaaccaaatctgtttccaatattctgtctacattgaagtttctctttctcttcctggtaacgacaaagtcgttggtttttggccaggggtatggatgatgggtaatttaggaaggccggggtatggagcgacgacagacggaacatggccgtattcatacgattcgtgtgattttggaacgttggccaatcagacgaatccagaagggactggaccgaaagccgcattgacttcggggacagacggtggtcctatctcatatctacctggtcagcggatgtctgcttgtacctgcaagggcgaagaccacgcagggccggacgtttcgtatgggcgcggcgtccccgaaatcgatgtactggaagctacggttgacttgacagttaagcgtggtgctgtcagtcagagcgctcaaatggctccttttgatgaagggtatcaatatgacaactcatccaaaggcggtattatatacgacacaaaaaatacccagtacaacgcctatctgggctcaatatatcaagaagcagtttcatcattgacttatattgaccacgagaactacgtggggactagcggtggctttggcgtctacggttttgagtacttttcgaacccagaggacaggggttctggacacatcacatgggtcgcaaacggcaaaaagtcatggacaatgttccccgacgctgttggtgctgtcgaatcaatggacatcggacaacgtctgatttcggaagagccgatggccatgatcatcaatttcggcatgtctgaaagcttccaacctgtagattttaaccaccttataacgcccatggaaatgctcgtcgactatgtaagagtgtaccagcgatcagaaggaagagttgggtgtgatccgaaagataggccgacggccgcgtatatcgagaatcatataaatgcgtatagcaatcccaaccttactacttgggaggctgccgggtataccatgccgaaaaactctttgatagatacatgttga

SEQ ID NO: 129 - protein, 273 aa, Cryptococcus neoformans
MLSSKFQPVSTVHLKLEGSGPVFGQWITWTDQDMPGRRTEHGREVSLGSYLESERLICQRYSYDSCEVGTLPNQTWVNGTGPIAAFTTGPNGGTLSYLPGQRISACTCPGKDHPGLDFTVGQAAPEIDMVEAQIAIAEGEGQVSAARQLAPFDDYYQFDNSTRYATIYDKDLTYDNTYLGSTTQQSASGLTTVPSNIYYDQNGESKQFTMFAIEYLVFPDDRDNAYITWWADNKTSWTLHSGGMGPNERTEISRRLIPEEPMTMVMNLHTYVG

SEQ ID NO: 130 - DNA, 822 bp, Cryptococcus neoformans
atgctatcttcgaagtttcagccagtttccacggtacatctgaaactggagggttctggcccggtatttggacaatggataacttggacagaccaggatatgccgggacgacggacggaacatggccgtgaggtatcactcggatcgtatttggaatccgaaaggcttatttgtcaaaggtattcttatgactcttgcgaggtcggcacattacccaatcagacatgggtgaatgggacaggtcccatagcagcgttcacgaccggacccaacggtggaactctatcatatttacctggccaacgaatttcagcttgtacttgccctggtaaagaccatcccggacttgattttactgttggtcaagcagctcctgagatcgatatggttgaagcccagattgccatcgcagaaggagaaggacaagtatctgcagctcgacagcttgcccccttcgatgattattatcagttcgacaattcaacccgatatgccaccatctacgacaaagatctgacctatgacaacacgtatctgggtagtaccacacagcaatcagcctctggtcttaccaccgtcccttccaacatctactacgaccaaaatggagagagtaaacagtttacaatgtttgctatagagtacctggtattcccggatgatcgagacaatgcgtacatcacttggtgggcggataataaaacatcttggacacttcattcaggcggtatgggtcccaacgagagaactgagatcagtaggcgacttatacctgaagagcctatgactatggtcatgaatcttcatacgtatgtcggataa

SEQ ID NO: 131 - protein, 879 aa, Cryptococcus neoformans
MTSTSEVDNPRSRQNSTNSLNNPAGSPSSRQPSHSRNDSEVIAASGVRHPSANHRPNASMSGSPGHLRSRSSHNASPVSALTRRKSSPNLSVPSSGRIMFGGDGSHTSGAERIIKGTSKWLRDKMGNGGEKNDHWLVLDLPSPSMLSDAGSMAIPVYDTRGYPSREGSLDRPRVAADTGTRQQGSAPTSCPEINVHLSQSTKNRSSPLGYTHNASLTPLAAQFPARNASPLNASLPSLADFYPDSVIFGNRTFGSGPRPALSVFGSSESSVMTIRSMSSLRSGFGTDTDSARKFRLDSDAGSDEGLIDIEARLKRHAAQGAYGMKNILPKSRLVNELEGNEEKRGLYDLLPFHIDPSQWEGANTEDDDELHRPESQDELDTQYFSSRGLANLGCLAIMGLAVVFLFAGLPIFEYFTTLPADTHGAFNIGGINSTGQVPDVANIFQLIDPDTPPEAYTHKSLDTGEEWDLVFSDEFNEDGRTFYNGDDPFWEAADLHYWQTNNLEWYDPSRLTTKNGKLVITLDEISSHGMNFEGGMMSSWNRFCFTGGYMEVSVSLPGTNDIPGLWPAVWTMGNLGRAGYGGSLDGTWPYTYDSCDVGTLPNQTLNGKPAVALTQGDPGHNNELSYLPGQRLSRCTCPDDDTHPGPKHSDGSFVGRSAPEIDLFEATLDMSIGKGQVSQSGQWAPFNPDYHFLNSSSKYYEIYDHDVTQINSYFGSVYQQATSGLSLTNQECYTDETGCFAVYGMEYAPGADGYITWVNDNKKAWTIHGAAMGPNKEAEVDQRPVTEEPMYMVLNLGISQNFGAVHFVGLQKLWPVQMEVDYVRVYQDPKKKNIGCDPAGRPTASYIARFPEAYSNANITTFDQVPNKKRPKNSLVDQC

SEQ ID NO: 132 - DNA, 2640 bp, Cryptococcus neoformans
atgacatccaccagcgaagtcgacaacccacgcagtcgacaaaactcaacaaattcgctcaataaccctgctggtagtccatcttcgaggcaaccctctcattcccgtaacgattcggaagttatcgctgcttctggagtcagacatccttcggccaaccaccggcccaacgcttccatgtcaggatctccaggccatctccgctcaaggtcttctcacaatgcttcacccgtttcagcacttactcggaggaagtcatcacccaacctctcagtgccctcatctggcaggatcatgtttggaggcgatggatctcacacttctggagctgagcgtatcatcaagggtactagcaaatggttgagggacaaaatgggtaatggcggggaaaaaaacgaccattggttagtactggatcttccttctccatcgatgcttagtgacgcggggagtatggccatacccgtttacgacactcgcggatacccatcccgtgaaggatctcttgataggcctcgggtggcagccgacacaggaactcgtcaacaagggtccgcccccacttcctgtcccgagatcaacgtacacctctctcagtctacaaagaacaggtcgagccctctcggatatacacacaatgcaagtctcacaccccttgcagcccagtttccagctcgtaatgcatcgccgctcaacgcatctctaccaagcttggcggatttctaccccgatagcgtcatctttggcaacaggacatttggtagcggcccgaggcctgctcttagtgtttttggcagctcggaatcttcagtcatgaccattcgaagcatgtcctcattgagaagtggatttggaactgatacagatagtgccagaaaattcagactcgattccgacgcgggttcagatgaggggctaatagacatagaggcgaggctaaagagacatgcggcccaaggcgcgtatggtatgaagaatattctccccaaatcaaggcttgtcaacgaattggaagggaatgaggaaaaacgaggtctgtatgatttgcttcccttccatattgatccctcccagtgggagggtgcgaacacggaggatgatgacgaactgcacagaccggaatcacaagatgaacttgatacccagtacttttctagtcgtgggcttgccaacttgggctgcttggcaatcatgggcctagctgttgtttttcttttcgccggtctgcctatcttcgagtatttcactactctacccgcggacacgcatggagcgtttaatataggaggtatcaattctacagggcaagtgcctgacgtagccaatatcttccagctaatcgatcccgacacgccgcccgaagcctatactcacaaaagtttagacacaggggaggaatgggacctggttttttcagacgagttcaatgaggatggacgaactttctataatggtgatgaccctttctgggaagccgccgacttgcattattggcaaaccaataacttggaatggtatgaccccagtcgattaactactaaaaacgggaaactggtcattacccttgatgaaatttctagtcatggcatgaattttgaggggggtatgatgtccagttggaataggttttgttttacaggcggttatatggaagtttctgtatctctccccggcacgaatgacatccctggtctttggcccgctgtttggactatgggaaacttaggacgggcgggatatggaggatctcttgatggcacttggccgtatacctatgattcatgcgacgttggcacattacccaaccagacgctcaatggtaaaccagcagtagcgttgactcaaggcgatccgggccacaataacgagctctcgtacttgcctggacagcgtctctcaagatgcacctgcccggacgatgacactcacccggggcctaaacattctgatgggtcttttgtagggagatcagcccctgagattgatttatttgaggctactcttgatatgtcgatcggcaagggtcaagtgtcgcagtccggacaatgggcacctttcaacccagactaccacttcctcaattcttccagcaaatattacgaaatttatgaccatgatgttacccagattaatagctatttcggcagtgtttatcaacaggctacgtctggcttgagtttgaccaaccaagaatgctataccgatgagactggttgtttcgcggtttatggaatggaatatgctcctggagcggacggttatattacttgggtcaacgataacaagaaagcttggactatccacggggctgctatgggacctaataaagaagctgaagttgatcaacggcctgtgacagaagaacccatgtacatggtactcaacttgggtatctcgcagaacttcggagctgtccatttcgttggcttacaaaagctatggcctgtgcaaatggaggtcgactatgttcgagtatatcaggacccaaagaagaagaacataggctgtgatccagctggccgtccaacggcgtcatatatcgccagatttcccgaagcatactcgaacgcgaatattacaactttcgatcaagtcccgaataagaaacgacctaagaacagtttggttgatcaatgctaa

SEQ ID NO: 133 - protein, 482 aa, Claviceps purpurea
MDQETYSHGYYGHPVPSAATTVNATPLRPGTPNTDASRNHFDNDGASSLRPGRSTNPFSSPDASRPASSYGSSSALGPRYDVNSQRYFHSRRVVKGEIEKPWLEKRDPKEKWVTIMPIIGILIGLAISGFLVWDGIRNVVHHKYCPVLDDRFDGGFNTDIWSKEVQVGGFGNGEFEQTTAGDENVFIDGGKLVIKATLQDVEKVEKNNVINLLKDGTCTSKDWYSCVAATNTTNGNSSIVPPTKSGRIHTMKGARLKYGRVEVTAKLPAGDWLWPAIWMMPVKDTYGPWPASGEIDIMESRGNNWTYGQGGNTIVSSALHWGPDPANDAWWKTNNKRQALHTSYSSGFNTYGLEWSQKYLFTYVNSRLLQVLYTNFDKPMWQRGGFSDYTANGTRVTDNWSQTGNNNAPFDQEFYLIINLAVGGTNGWFEDGKSSKPWADHSPNARKDFWGARDQWYPTWTQPQLEVSRVVMMQQCDGNEGL

SEQ ID NO: 134 - DNA, 1449 bp, Claviceps purpurea
atggatcaagaaacctactcgcatggctactatggccacccagtgccttcagccgccacgacggtcaacgcaactcccctccgccctggaaccccaaacacggatgcgagccggaatcactttgacaatgatggcgcatcgtcgcttcggccgggaagaagcacaaatccgttttccagcccggatgcgtcgcggccggcctcgagctatggatcctcgagtgccttgggcccgcgctacgacgtcaactcacagcgctactttcactcacgacgtgtggtcaagggagagatagagaagccgtggctggagaagagagatccgaaggagaagtgggtgacgattatgcccattattggcattttaataggcctggcgatttcggggtttctggtgtgggacggcattcgcaacgtcgttcaccacaagtactgccctgtactggacgacaggtttgatggtggattcaacaccgacatttggagtaaggaagtacaggtaggaggctttggaaacggcgagttcgagcagacgacagccggcgacgaaaacgtcttcatagacggcgggaagctggtcatcaaagccacgctccaggatgtggaaaaggtggaaaagaacaatgtcatcaacctgctcaaggacggcacatgcacatccaaagactggtacagctgcgtggccgccaccaacaccaccaacggcaattcgagcatcgtgccgcccaccaagtctggccgaatccataccatgaaaggcgccaggctcaagtacggccgcgtcgaggtcacggccaagctccccgcaggcgactggctctggcccgccatatggatgatgcccgtcaaggacacgtacgggccgtggccagcctcgggcgagatagacatcatggagtcgcgcggcaacaactggacgtacggccagggcggcaacaccatcgtgtcttcagccctgcactggggcccggatccagccaacgacgcatggtggaagacgaacaacaagcgccaggcgcttcatacgagctacagcagcggcttcaacacgtacggcctcgagtggtcgcagaaatacctctttacgtatgtcaacagccggctgctccaggtgctctacaccaactttgacaagcccatgtggcagcggggtggcttctccgactacaccgccaacggcactcgtgtgaccgacaactggagccagacgggcaacaacaacgcgccgtttgaccaggaattttacctcatcatcaatctggccgtcgggggcaccaacggctggttcgaggacggcaagtctagtaagccgtgggcggaccactcgccgaatgcgcgcaaggacttttggggcgcgagggaccagtggtacccgacctggacgcagcctcagctggaggtgagtcgggtggtgatgatgcagcagtgcgacgggaatgagggactgtga

SEQ ID NO: 135 - protein, 642 aa, Coccidioides posadasii
MNSNVNRAKKVPQLRLNSGYHDPFTDQSNGVGEFSAASRPLIAPPEPPYSPVSRLNSSPERLAIPPTRAYLETRRHNAESHHDLSCRSSWTSDAGSRNSRQYFEYYPFGESKVSSREGSDEDVINTQTVAEKFAIFPDKDLIVFPHDVEKDDEMHNPDPEDKYRDCRVCTKRGFLNVGALLFICLGLLTLFIGYPVITFAEKLIRGSDPTGCNADPMCLDVGKISLKNIRTSLIDPDTPDSAKSITAADGKKWELVFSDEFNRDGRTFFEGDDPFLQAVDIWYGVTQDLEWYDPDAVTTKDGVLEIRFDAFQNHGLNYRSGMVQSWNQLCFTGGRLEASISLPGRGDTSGLWPGFWSMGNLGRPGYAATTEGMWPYTYHDKCDAGITANQSSTDGISFLPGMKLPACTCDGEDHPTPGKSRSAPEIDVIEASVHPLNKEVSSTIGDVSQSAQIAPFDIWYMPNYEFMELYDPKITHINDYRGGPFQQAISGITNLNNDWYDGKAYQVYAFEYTPGAKGEITWFVGKDKTWKLDARAIGPNGNIGQRVIPVEPMAIIMNLGMSHSFAPLNLTGLASLLPAKMRFDYVRLYQDPDKKSVTCDPPGMETTRYIKKHKEVYTNPNLTTWSQTDYSWPKNDFVHGCG

SEQ ID NO: 136 - DNA, 1929 bp, Coccidioides posadasii
atgaattccaacgtgaaccgagcgaaaaaagtaccccaacttcgcctgaattccggctatcatgatccttttacagaccagtcaaatggtgtgggcgagttctccgccgcatctcgtccattgatcgcacctcctgaaccgccttattcgccagttagtcggctcaattcctctccagagcgtctggccattcccccgacaagagcgtacctcgagactcgccggcacaatgcagaatcacaccacgatttatcgtgtagatcgagctggacctccgacgcagggagtcgtaacagtcgtcaatacttcgaatactacccatttggagagtcgaaagtttcatcgcgagaagggagcgacgaggatgtgatcaacacgcaaaccgttgctgagaaatttgccatcttcccggataaggatctcatagtcttcccgcacgacgtggaaaaggacgacgagatgcataatcccgacccagaggataaataccgggattgtcgggtgtgcacaaaaagaggattcctgaacgttggcgccttgcttttcatttgtttaggccttttgactcttttcattggttacccagttatcacctttgccgaaaaattgattcgtggctctgatccaactggctgcaatgctgatccgatgtgtcttgatgtcggaaaaatttcattgaaaaatattcgaacttcattgattgaccctgatacccctgattcagcaaagtcaattactgcggcggatggcaaaaagtgggagttagtgttttctgatgagttcaatcgggacggacgcaccttttttgaaggagatgacccatttttgcaagcagttgatatttggtatggcgttacacaggatttggaatggtatgaccctgatgccgttacgacaaaggacggcgttttggagatacgatttgatgcttttcaaaatcatggactaaattatcgatctggtatggtgcagtcgtggaatcagctgtgcttcactggagggcgtttggaggcgagcatatcccttcctggtcgaggcgatacctctggtctttggccaggtttctggtccatgggcaatctcggacgacctggatatgccgctacaaccgaaggcatgtggccatacacttaccacgacaagtgcgacgctggtattactgcaaaccaaagctccacagatgggatcagctttcttcccgggatgaaacttccagcctgcacgtgcgacggcgaggaccacccaacacccggaaagtcgcgatccgccccggaaattgacgttattgaagccagtgtccatccactaaataaggaagtttcatcaaccatcggtgatgtatcgcaaagtgcacaaattgcaccttttgatatttggtatatgccaaactatgaatttatggaattgtatgatcccaaaatcacgcatataaatgactaccgcggtggccctttccagcaagccatttctggaatcaccaacttaaacaacgactggtatgacggcaaagcatatcaagtatacgccttcgaatacacgcctggtgcgaaaggagaaataacgtggtttgtcggtaaagataaaacctggaaactcgatgcacgtgccatcgggcccaatgggaatatcggacagcgagtgatccccgtcgagcccatggcaattatcatgaacttgggcatgtcccacagttttgcaccgttgaacctgacaggtctagcgtcattgctccccgcaaagatgagattcgactacgtgagactgtaccaggatcctgataagaaaagcgtgacttgtgacccgccagggatggagacaacgcgctatatcaagaagcacaaggaagtctataccaatcctaacctgacaacctggtcgcagacagactactcatggccaaagaacgacttcgttcatggatgcggttaa

SEQ ID NO: 137 - protein, 487 aa, Chaetomium thermophilum
MHSNRDDQTGGNPAPPESTIPQRPGSPTNSEGAGRDPFSDGVESRASNRENEKIPGGATANPFSSPSVSRPASSIGSASVIGGPRYDNVPRYFHSRRVKKGEVEKPWLKNKDPKEKWVTILPILGIFIGLGLSGLLVWDGIKSVVHHKYCLVLDETFQNGLDPAIWTKEVQVNGFGNGEFEMTTGGDQNVFVQDGKLIIRAMPQDDALMQKDYKIDLLKDGTCTSTNPANCIAWTNTTAGNATIVPPVTSGRIHTRKGASIKYGRVEVTAKLPKGDWLWPAIWMMPVKDTYGAWPRSGEIDIMESRGNNYSHPQGGNDIISSTLHWGPNPANDGWWRTNVKRRALHTTYSDKFHTFGLEWSQKYMFTYVNTRLLQVMYVNFDEPMWQRGNFPNQDANGTRLEDIWAKTGRYNTPFDQPFYLILNVAVGGTNGWFQDGAHGKPWLDGSPNARKDFWLAKDRWLPTWTNPQMEITRVVMMQQCDGDEDL

SEQ ID NO: 138 - DNA, 1464 bp, Chaetomium thermophilum
atgcacagcaaccgtgacgaccaaaccggcggtaacccggcgccgccggaatcgacaatccctcagcgccctggctcccctacgaattcagaaggcgccgggcgcgaccccttttccgacggcgttgaatcgcgcgcctcgaatcgcgagaacgagaagattcccggcggtgctacagcgaaccccttctccagcccatcagtatcgcgtccggccagcagtattgggtcggcgtcagttattggagggcccaggtacgataatgtgcctaggtacttccactccaggagagtaaagaagggagaggttgagaagccgtggttgaagaataaggatcctaaggagaagtgggttacgattctacctattctgggcattttcatagggttgggtctctcggggttgttggtgtgggacggtatcaagagtgtcgtgcatcacaagtactgtctcgtgctggacgagacgtttcagaatgggctggatccggcgatttggacgaaagaggtgcaggtcaacgggtttggcaacggcgaatttgaaatgaccacaggcggcgaccaaaacgtcttcgtgcaagacggcaagcttatcatccgcgcgatgccccaagacgacgcgctcatgcagaaagactacaagatcgacctactcaaggatggcacttgcacgtcgactaaccccgccaactgcattgcctggaccaacactaccgctggcaatgctaccatcgtccctcccgtcacctccggccgcatccacacacgcaagggcgctagcatcaagtacggccgcgttgaggttaccgccaagctgcccaaaggcgactggctgtggcccgccatctggatgatgccggtcaaggacacgtacggtgcgtggccgcgctcgggcgaaattgatatcatggagtctcgcggtaacaattactcgcacccgcagggcggcaatgatatcatttcctcgactctgcattggggtcctaacccggccaatgacggctggtggaggaccaatgttaagcggcgggcgctgcacacaacgtattcggataagttccataccttcgggctggagtggtcgcagaagtacatgttcacgtatgtgaacactaggctgctccaggtcatgtatgttaactttgacgagccgatgtggcagcggggcaacttccccaaccaagatgccaacggtactcgtttggaggacatctgggccaagacggggagatacaacaccccgtttgaccagccgttttacttgattctaaacgtggccgtgggcggcaccaacggttggttccaggatggtgcacatggcaagccgtggttagatggttctccgaatgctaggaaggacttttggctggcgaaggatcgttggttgcctacttggaccaacccgcagatggagattacccgggttgttatgatgcagcagtgtgatggagatgaggatctttaa

SEQ ID NO: 139 - protein, 463 aa, Endocarpon pusillum
MDQGHQNYSIPGTARNSGTSTPQNRAHSPENYIEDIAPVPNPFASPYGSNAQSTRTSSAALHQQGLSQRYFHSRRVKKGEVEKPWTAHKDPREKWVTIIPLIGLFLGLAISGFLIYDGLRTVVNHEYCPILDEDFSNGLDENIWLKEAEVGGFGNGQFEQTTNTDENIFLQDGMLVIKPTLQDPALIEQDTIIDLTAEGICSSELFENCVVATNTTNGTIVNPVKSGRLSTRNGAFIKYGRIEVTAQLPSGDWLWPAVWMLPRDSVYGEWPQSGEIDIVEGRGNNHTYEQGGNNIVSSALHWGPNPANDAWWRTNVKRNALHTTYASKFHTFGMEWSEKYLFTYIDTRLLQVLYANFDIPLWERGDFPLSDSNGTRLVDPWSQTGNVATPFDQDFYLILNVAVGGTNGWFEDGKSGKPWVDGSPTARRDFWNTQDSWYPTWEENGQMKVKSVKMWQQKGYNGC

SEQ ID NO: 140 - DNA, 1392 bp, Endocarpon pusillum
atggaccaaggtcaccaaaattactctatcccaggaacagcacgaaacagcggtacctctacaccacagaaccgagcacattctccagagaattatatcgaggatattgctcccgttcctaatccattcgcttctccttacggctccaatgctcaatcaacacgaacctcttcagctgcgcttcatcaacaaggtctctcacaacgatacttccactcccgaagagtgaagaaaggcgaggtagagaaaccatggacagctcacaaagaccctcgtgagaaatgggtcaccattatcccgctgatcggactcttcctcggcctcgccatctcgggcttcctcatctatgacggcctccgtacagtcgtcaaccatgagtactgccccatcctcgatgaagacttttccaacggtcttgatgaaaacatctggctgaaagaagccgaagtcggtggctttggcaacggccaattcgaacaaaccaccaacaccgacgaaaatatcttcctgcaagacggcatgctagtcatcaaacccaccctccaagacccagcccttatcgaacaagacaccatcattgatctcaccgccgaaggcatctgctcctccgaactcttcgaaaattgcgttgtcgccaccaacaccaccaacggcaccatcgtcaaccccgtcaaatccggccgtctctccacccgcaacggcgcctttatcaaatacggccgcatcgaagtcaccgcccagttgccgtccggcgactggctctggcccgccgtctggatgttaccgcgcgactccgtctacggcgaatggccccaatcaggcgagatcgacattgtcgaagggcgtggcaacaaccacacctatgaacagggaggaaacaatatcgtctcctcggctctgcattggggccccaacccggccaacgacgcctggtggcgcaccaacgtcaagagaaatgccctgcacaccacctacgcctccaaattccacaccttcggcatggagtggagtgagaaatacctcttcacctacatcgatacccgcctcctgcaggtcttgtatgcaaactttgatatcccgctttgggaacggggagacttccctctctcggattctaacggtactcgcctcgtcgacccgtggtctcagaccggcaatgttgctacaccgttcgatcaagacttctacctgattctgaatgtggcggttggtggtacgaatggttggtttgaggacggcaagagtggcaagccttgggttgatggttccccaactgcacgcagggacttctggaacacccaggatagctggtatcccacttgggaggagaatgggcagatgaaggttaagagtgtgaagatgtggcagcagaaagggtataacggctgttag

SEQ ID NO: 141 - protein, 466 aa, Exophiala dermatitidis
MAQYQRPRNLAQVDSSLHVEHGSPLASPNSAMASSVPKAEKPANPFLTPYASEHPSRTASSAMLHQDMLTHRYFHSRRVKKGEVERPWTKIKDPKEKWVTIIPMIGLLVGLGIAGFLVWDGLRTVVNHKYCPVYLEDFSNGLDSKVWTKEAEVGGFGNGQFEQTTVTDENVFVQDGMLHIKPTLQDPKLIETNNVINLSAQGICSSSTWSDCITGTNTTNGTIVNPVKSGRINTRKGASIKYGRIEVEAKLPEGDWLWPAIWLLPVENKYGQWPQSGEIDIVESRGNNHSYPQGGNDIVSSTLHWGPNSANDAWWKTNVKRNALHTTFSKKFHTFGLEWSEKYLFTYIDTRLLQVLYTNFNEPLWQRGHFPLSDSNGTRLVDPWSQTGVASTPFDQDFYLILNVAVGGTNGWFQDGKNGKPWVDASPTAKKDFWDAKDSWYPTWKDRGEMVVKSVKMWQQQGYKGC

SEQ ID NO: 142 - DNA, 1401 bp, Exophiala dermatitidis
atggcgcagtatcagcgtcctcgcaatcttgctcaagttgattcctctctgcacgttgaacacggttctccgctggcctcaccaaactccgccatggcctccagcgtgcccaaagcagagaaacctgccaatccctttctgacgccatatgcctctgagcacccatcgaggactgcatcatcagccatgttgcaccaagatatgctcactcaccgatattttcattctcgaagggtcaaaaagggtgaagtggaacgaccatggaccaagatcaaagaccccaaggagaagtgggtgaccataatccctatgattggactgcttgtcggtctaggcatcgcgggctttcttgtctgggatggactgcgaaccgtcgtcaatcacaaatattgtccagtgtatctggaggacttttcaaatggcctggactcaaaagtctggacaaaagaggcagaggtgggcggctttggtaatggtcagtttgaacagaccaccgtcaccgacgagaacgtgtttgtgcaagacggaatgctgcatatcaagcccacattgcaggacccgaaattgattgagacaaacaacgtcatcaacctgtcagcccaaggtatttgctcatcctccacttggagcgattgcatcactggcaccaacaccacaaacggcacaattgtcaatcctgtcaagtccggacgcatcaacaccaggaaaggtgcatccatcaaatatggtcgaattgaggtcgaagccaaactgcctgaaggtgattggctttggcctgccatatggctccttcccgtggaaaacaaatacggacaatggccacaatctggcgagatcgatatagtcgagtctcgagggaacaaccatagctatcctcaagggggcaatgacattgtctcaagcaccttgcactggggccccaactccgccaacgacgcttggtggaagacaaatgtcaagagaaacgccctgcatacaaccttttcaaaaaagttccacacgtttggcctcgaatggtcggaaaaataccttttcacctacatcgacactcggctgttacaagtgctgtataccaacttcaatgagcccctatggcaacgaggccattttccgctttccgacagtaacggtacacggttagtggacccttggtcgcagacaggcgttgcttccacgccgtttgaccaagatttctacctgatcttgaacgttgctgttggtgggacaaacggttggtttcaagacggtaagaacggaaagccatgggttgatgccagtccaacagcgaagaaggacttttgggatgccaaagattcatggtaccccacgtggaaggaccgcggcgagatggtggtcaagagtgtcaagatgtggcagcagcagggatacaagggttgctga

SEQ ID NO: 143 - protein, 480 aa, Fusarium graminearum
MSNPYRKSSYGSHDGMGPTDMPRRSMDSNGNHADATGTGYRQSIDNGRGSGSASNAGMFSIPEYASPSSECDSGTQVDGRNRYFHSRRVRPGEVEKPWLEKTNPKEKWVSIFPLLAIFLGLVGSGFLVWDGVRSVVKNKYCPVLDEDFSQGLNPNIWTKEVEVGGYGNGQFEETTGGDENVYVDNGNLIVKATLQDSKLLQKNNVINLLKDGTCTSKVWSNCVAATNLTGGNNTIIPPVRSGRINTKKGANIKYGRIEVTAKLPEGDWLWPAIWMLPKTSKYGPWPRSGEIDIIESRGNNWTYKQGGNDIISSALHWGPNSANDGWWKTNNKRKALHTTYSAGFNMFGLEWSEKYLFTYVNTRLLQVTYTNFKKPMYQRGGFPDVDQNGTRLDDPWAAANDVNAPFDQEFYLIINLAVGGTNGWFQDGKSGKPWYDASPTAKNDFWDARDQWYPTWKQPQVEVSRVVMMQQCNGNENADL

SEQ ID NO: 144 - DNA, 1443 bp, Fusarium graminearum
atgagcaacccgtatcgaaaaagcagctatggtagccatgatggcatgggcccaaccgacatgccacgaagatccatggactccaatggcaaccacgcagatgcgaccgggactggatatcgtcaaagcattgataatggacgtggctcaggctctgccagtaatgcaggcatgttcagcatcccagagtacgcaagtccttcttcagaatgcgactctggaactcaagtcgatggccgaaatcgctacttccactccagaagagtgagacctggtgaagtcgagaagccgtggctcgaaaagaccaatcccaaggagaaatgggtctccattttcccccttctcgccatcttcctcggcctcgttggatccggctttctcgtttgggacggtgtcaggagtgtggtcaagaacaagtattgccctgtcctggatgaagactttagtcaaggtctaaacccaaatatttggactaaagaagttgaagtcggtggatacggaaacggccagtttgaagaaactaccggcggtgacgagaacgtctacgttgacaacggcaatctcatagtcaaggccacactgcaagactcaaagctgttgcaaaagaacaatgtcatcaaccttctcaaggacggcacctgcacttccaaagtttggtccaactgcgttgctgccaccaatctgaccggaggaaacaacactatcatccctcccgtcaggtctgggcgcattaataccaagaagggtgccaacatcaaatatggtcgaattgaagttactgcaaagctacctgaaggtgattggctttggcccgctatctggatgcttcccaagacaagcaagtatggcccttggcctcgctccggagagattgacattattgaatcgcgtggaaacaactggacgtacaaacaaggtggaaatgacattatttcttcagctctgcactggggacccaactctgccaacgacggttggtggaagaccaacaacaagcgaaaagctctgcatacaacctacagtgccgggtttaacatgtttggtttggagtggtctgaaaagtatctcttcacttatgtcaacacccgccttcttcaagtcacatacacgaacttcaaaaaacccatgtaccaacgaggagggttccctgatgtagaccagaatggcacccgactcgatgatccctgggctgccgcaaacgatgtcaatgcaccgtttgaccaagagttttacctcattatcaacctggctgttggcggtacaaatggttggtttcaagatggcaagtcgggcaagccctggtacgacgcctcacccacagcgaagaatgacttttgggatgctagagaccagtggtatcctacctggaaacaaccacaggttgaggtcagtcgtgttgtcatgatgcagcaatgcaacggcaacgaaaacgcggatctctaa

SEQ ID NO: 145 - protein, 458 aa, Fusarium fujikuroi
MSLGCNSTAIRSSGSYLASTSHANSTEDLVRPSLAAQSSTESSLKKRFPPRPYFHSRRVKKGTVERPYLAVKDPRGIWITIIPALGILVGLAAIALLTWSGYKSVDKHKYCTVFTDDFSNGFNSTIWNKQVEVGGYGNGEFELTTDTDENVFVRDGQLIIKPTLQTDKFLSETTKINLTAQGTCSATTTQDCVQVANLTAGEIVAPVKSGRITTKNFGVIRYGRVEIVAKLAAGDWLLSQLMMFPAKEYYGAWPASGEIDIGMVRGNNYTYDNGRGNQQVSTQLHWGLDTGTDRWQSTSGARDTLRTTFHKDFHTFGLEWSDKYLFTWLDHRIAQVTYVKFNHPFYQHGGFHQALANGSQISNPWTGPGTSNATPFDRPFYLIIALAVGGTSGWFPDDVHGKPWVNDAITPKTDFWNAKDRWYPTWEKNDGGEMVIKRVSMWQQCDRAATDLSQFSSS

SEQ ID NO: 146 - DNA, 1377 bp, Fusarium fujikuroi
atgtcgttggggtgtaacagcactgcaattagatcctctggatcatatctggcctctactagccatgcaaactcaacagaagacttggtcaggccgagcctcgcagctcaaagttcaactgagtcctctctcaagaaaagattcccccctcgtccatatttccattctcgccgggttaagaagggcactgtcgaaagaccataccttgcggtaaaggaccctcgaggcatatggattacgatcatccctgcgctgggcatccttgtcggacttgctgccatagcgcttctaacatggagtggctataagtcagttgataaacataaatactgcacggtatttacagatgacttttccaatgggttcaattctacaatatggaacaagcaggtagaggtcggaggatacggaaatggcgagtttgaactgacgacagacacggatgagaacgtcttcgtccgcgacggccaactcatcatcaaacccaccctccaaaccgataaattcctctccgaaacaacgaagataaacctcactgctcaagggacttgttccgccacaacaacccaagactgtgttcaagtcgcgaacctcaccgcgggagaaatcgtcgcgcccgtcaagtccggcaggatcacgaccaagaactttggcgtcatccgctacggccgcgtcgagatcgtcgccaagctcgcagcgggagattggctcctctcgcagctcatgatgttcccagccaaggaatactacggcgcgtggcctgcctctggcgagattgatatcgggatggtgcgggggaataattacacttatgacaatgggcgcgggaaccagcaggtgtcgactcagctgcactggggtcttgatacaggcactgatcggtggcagagtacttccggggcaagagatacgctgcgcacgacctttcataaagactttcatacttttggactggagtggtcggataagtatctcttcacgtggctcgaccatcgcatcgcacaggtcacgtacgtcaagttcaatcacccgttctaccagcacggcggcttccatcaggccctcgccaacgggtctcagatctcaaatccttggactggcccgggaaccagtaatgcgacgccttttgatcggccgttctacctgatcatcgcgctggctgttggggggacatcgggctggttcccggacgatgtgcacggtaagccctgggtgaacgatgcgatcaccccgaagacggatttctggaatgcgaaggatcgatggtatccgacatgggagaagaatgatggcggggagatggtgatcaagagggtttctatgtggcagcagtgtgatcgcgctgccactgatttatcgcagttttcatcaagttag

SEQ ID NO: 147 - protein, 469 aa, Fusarium solani
MSRPAPTQTEGLPATAPYPDAVGTPPQSSTPALGRGSRVSSYQGQGWSLTSVTIDEKPRRKFKSSRLVGEYEKPWLADWKRETNWDSIIFYSGVLIALCISAYIAWNTVRKIPKNEYCLILDDRFTTLDKNTWSHEIQMNGFGTGSFDWTTDDPSNAYVDEQGLHIVPTLTLEKTKLTEDQMLDRHVVNLTRDGTCTFDHQRLSNLTFNNPCWARSNATSRAMINPVRSARLTTSRKKSIKYGRVEVEAKLPSGDWMWPAIWMMPQDSVYGEWPRSGEIDIMESRGNDAEKYPLGNNIVSSAMHWGTLYDTDAFRLSMGEWGSKRTKYSDNFHTFGLEWNEKYLFTWLDGRLRQIVFFDFTKNKNMWEYGKFAGITVNKTVHRDTWSQTGRSNTPFDQDFYLILNVAVGSTNGWFPDKLGEKPWSDESSAPMRDFWDAKNTWLPSWGEEKDRGMIVRSVKMWQEGACST

SEQ ID NO: 148 - DNA, 1410 bp, Fusarium solani
atgtcgagaccagctccgacgcagacagagggcctcccagccacggctccctacccagacgcggttggcactcctccacagtcctcaactccagcgcttggtcgtggtagtagggtctcatcctaccaaggtcaaggctggtcattgacatctgtgacaattgatgagaaacctcgccgaaagttcaagtcttcgcggcttgttggagagtatgagaagccatggctcgccgactggaagcgtgagacaaactgggatagcatcatcttttacagtggtgtcctcatcgctctctgtatttcggcttacatcgcgtggaacaccgtccgaaagattcccaagaatgagtactgcctcattctcgacgaccgcttcacgacattggataagaatacctggagtcatgagattcagatgaacggattcggaactggatcctttgactggaccaccgatgatccttccaacgcctacgtcgatgagcagggcctccatatcgtcccaacactgacactcgagaaaaccaagctcaccgaggaccaaatgctcgacagacacgtcgtcaacctcaccagagatggaacttgtaccttcgaccaccagcgcttatccaacctcaccttcaacaatccctgctgggcgcgtagcaatgcgaccagccgagccatgatcaatcccgtccgctctgcccgtctcaccacgtcgcgcaagaagagtattaagtatggccgcgttgaagttgaggctaagcttccttctggagactggatgtggcccgccatctggatgatgccccaagactcagtctatggcgagtggccccgtagcggcgagatcgacattatggagtcgcgtggtaacgatgcagaaaagtaccctctcggtaacaacattgtcagctcggcaatgcattggggtacactgtatgataccgatgcctttcgcctcagcatgggcgaatggggttccaagaggaccaagtattcggacaactttcacacctttggccttgaatggaatgagaagtacctctttacgtggcttgatggaagactacgccaaatcgtcttctttgactttaccaagaacaagaacatgtgggaatacggtaaattcgccggcatcacagtcaacaagacagtccacagggatacttggagtcaaactggacgatccaacactcctttcgaccaggatttctacctcattctaaacgttgctgttggttccacaaacggctggttcccggacaagctgggcgagaagccgtggtctgatgagagttcagctcccatgcgtgacttttgggacgccaagaacacgtggctgcccagttggggagaggagaaggaccgtggtatgattgtgcggtcagtcaagatgtggcaagagggggcatgctcaacctag

SEQ ID NO: 149 - protein, 456 aa, Fusarium oxysporum
MDASGPHEATSTGYRHSTDPGRGSGSGGHGGMFSIPEYSSPASESESTSGSGTQIDERNRYFHSRRVKPGEVEKPWLEKTNPKEKWVTIFPILAIFLGLVGSGFLVWDGIRSVVKNKYCLVMDEDFSQGLNPNIWTKEVEVGGYGNGQFEQTTNTDENVYVEDGKLIIKATLQDPKLMQKNNVINLLKAGTCTSKVWSNCVTSTNLTAGNNSVVPPARSGRINTKKGANIRYGRIEVTAKLPEGDWLWPAIWMLPRQSVYGAWPRSGEIDIIESRGNNWTYKQGGNDIVSSALHWGPNSANDGWWKTNNKRKALHTTYSAGFNMFGLEWSEKYLFTYVNTRLLQVTYTNFKKPMYKRGGFPDVDQNGTRLTDPWTVSPNVNAPFDQEFYLILNVAVGGTNGWFEDGKSEKPWYDASPTAKKDFWDAREQWYPTWTQPQLEVSRVLMMQQCNGNEDL

SEQ ID NO: 150 - DNA, 1371 bp, Fusarium oxysporum
atggacgccagtggccctcatgaggcaacctcaacaggataccgccacagtaccgaccctggacgaggctcaggttcaggtggccacggcggtatgttcagtattccagagtactcgagccctgcctcagagtctgaatctacatctggctcaggaactcaaatcgacgagcgaaatcgatactttcactcaaggagagtgaagccaggcgaggttgagaaaccgtggctggaaaaaaccaaccccaaagaaaaatgggtgaccatctttcccattcttgcaatcttcctcggcctcgtgggttctggctttcttgtctgggatggcattcgaagcgtagtcaagaacaagtattgtcttgttatggacgaggatttcagccaaggtctgaaccccaacatttggactaaggaagtcgaagttggtggctatggaaatggccaattcgagcagacaacaaacacagacgagaacgtctatgtcgaagatggcaaactcatcattaaggcgactttgcaggatcccaagttaatgcagaagaacaacgtcatcaaccttctcaaggccggcacttgcacctctaaagtctggtcgaactgtgttacctccaccaacttgactgctggaaataacagcgtggttcctcccgcgcgatctggtcgtatcaataccaagaagggtgccaatattaggtacggccgtatcgaggtcaccgccaagctccctgaaggtgactggctctggcctgctatttggatgctcccaaggcagagtgtctacggtgcctggccgagatctggcgagatcgacatcattgaatcacgcggaaacaattggacgtacaaacagggcggaaacgacattgtttcctcggcgctacactggggtcccaactctgccaacgatggctggtggaagaccaacaacaagcgaaaggcccttcacaccacctatagcgctggtttcaacatgtttggcttggagtggtctgaaaaatatctcttcacttatgtcaacacccgactcctccaagtcacatacaccaacttcaagaagcccatgtataaacgaggggggtttcccgacgtggatcagaatggcacccggctcactgatccatggactgtctcacctaatgtgaacgcgccattcgatcaggagttttacctcatcctcaatgtcgccgtgggcggcacgaacgggtggtttgaggatggaaagtctgagaagccatggtacgatgcctcgccaacggctaaaaaggacttttgggatgcaagagagcagtggtatccaacttggacacaaccacagcttgaagtaagccgagtactcatgatgcaacagtgcaatggcaatgaggatctatga

SEQ ID NO: 151 - protein, 483 aa, Gaeumannomyces graminis
MDLYYGRPVAGQPSAASTAQGTPTHRPTTPDERNPFGDGLESQASHRAGPQAGNGGTNPFGTPSGSRPESTVGSASGINRFEERAQRYFQSRRVRKGEVEKPWLAKTDPKEKWVTILPILGILVGLGISGFLVWDGLRSVVHHKYKLVLDENFSQGLRSEIWKKEVTVGGFGNGEFQQTTGGDENVYVEGGVLKIKATLQDETLIAKDSVIDLTADGTCTSTLFRDCYAATNTTSGNATIVPPTKSGRINTKDSISIKYGRVEVTAKMPLGDWLWPAIWMMPVNETYGAWPRSGEIDIMESRGNDYLYAQGGNNIMSSALHWGLNAGTDAWWKTNNKRQALKSTYSSGFNTFGLEWSQNYLFTYVNSRLLQTMYVNFDTPLWKRGNFPEYGGDGKKLDNVFAEQNRNNVPFDHRFYLILNVGVGGTNNWFEDGKSNKPWLNSSPNAKKDFWAQRDVWHPTWKQPQMEISRVQVWQQDDGNEEL

SEQ ID NO: 152 - DNA, 1452 bp, Gaeumannomyces graminis
atggatctgtactacggccgtccggtggccggccagccgtcggcggcgtcgacagcacagggcacgcccacgcacaggccaacgacacccgacgagcgcaaccccttcggcgatggcctcgagtcgcaggcctcacacagggcgggcccgcaggccggcaacggcggcaccaaccccttcggcaccccctcgggctcgcggcccgagtctactgtcggctcggccagcggcatcaaccgattcgaggagcgcgcgcagcgctacttccagagcaggagggtgcgcaagggcgaggtcgagaagccgtggctggccaagacagaccccaaggagaagtgggtcacgatcctgcccatcctcggcatcctcgtcggcctgggtatctcgggcttcctggtctgggatggcttgaggagtgtggtccaccacaagtacaagctggtcctggacgagaacttttcgcagggcctgcggagcgaaatttggaagaaggaggtcaccgtcggtggctttggaaacggcgaattccagcaaaccactggtggagacgagaacgtctacgttgagggcggtgtgctcaagatcaaggcgacactgcaggacgagactctgattgcgaaggacagcgtgatcgacctcaccgccgacggcacctgcacgtcaactctgttcagggactgctatgccgcgaccaacacaaccagcggcaacgcaaccattgttccgcctaccaagtccggtcgcatcaacaccaaggacagcatctcgatcaagtacggccgtgtcgaggtgacggccaaaatgcccctaggcgactggctgtggcccgccatctggatgatgcccgtcaacgagacgtacggcgcttggccgcggtcgggcgagatcgatatcatggagtcgcgcggcaacgactacctgtacgcccagggcggcaacaacatcatgtcctcggcgctgcactggggcctcaacgcgggcaccgacgcctggtggaagaccaacaacaagcggcaggcgctcaagtcgacctactcgtccggcttcaacacgttcggcctcgagtggtcgcagaactatctgttcacctacgtcaactcccgcttgctgcagaccatgtacgtcaacttcgacacgccgctgtggaagcgcggcaactttcccgagtatgggggcgacggtaagaagctggacaacgtctttgccgagcaaaaccgtaacaacgtcccctttgatcaccgtttctacttgatcctcaacgtcggcgtcggcggcacaaacaactggttcgaggacggcaagagcaacaagccctggctcaactcgtcgcccaacgccaagaaggacttttgggcgcagcgcgacgtctggcaccccacctggaagcagccccagatggagatcagcagggtccaggtatggcagcaggacgacggcaacgaggagctctaa

SEQ ID NO: 153 - protein, 709 aa, Lachancea thermotoleran
MSVRNLTSNTREQQASYSGGDQGNASASQNVPVRNPFTDDAEDDTYASYSASDTSLLHHDDGASATDAAGAAGSAAVGSRDVSDYKGYYSKGAAGARLTPGSRAGPAALPSSSSLSSHTGISNNDITAPPGFDRYPVVGSRVASMAPVGGAAAVGAAGAAAHNGSHNNSSASISSSDPFISDQDFSPFGGYPTSSFPLHLDEKEDDDYLHNPDPEEEARLDNSKFMLDFKHMDRRSAGGFFGFLFLFLGALTLFVVLPVLTFTGAVDHGKPQTITYLSLYEYPQLSAIRTSLVDPDTPTSAKTWKAKDGSEWPLAFSDEFNAEGRTFYDGDDQFWTAPDFHYAATHDLEWYSPDAVTTANGTLKLRMDAYKNHDLYYRSGMLQSWNKLCFTQGYIEASANLPNYGRVIGLWPGMWTMGNLGRPGYLASTEGVWPYSYEACDAGITPNQSSPDGISYLPGQKLSSCTCDGEDHPNQGVGRGAPEIDIIEGSADTYIGGSGVGVASQSLQLAPFDIWYMPDYDFIEIHNSTVTAMNTYAGGPFQQAVSAVTALNVTWNEFGPDAGYFQSYGFEYLNDHDTGYIRWFVGQQPTMTIHSTALHPNGNINWRPISKEPMSIILNLGISNNWAYIDWNSIFFPVTMSIDYVRIYQPENATSITCDPSGFPTYQYIQDHLNVYSNVNLTSWEDAGYTFPKNTLTGNCKSSKKNKDY

SEQ ID NO: 154 - DNA, 2130 bp, Lachancea thermotoleran
atgtcagttcgaaacttgaccagcaacacgcgtgagcagcaagcttcgtactcgggtggagaccaaggcaacgcttctgcgtcacagaacgttcccgtaaggaatccgtttaccgatgacgcggaagacgacacatacgcttcctatagcgccagtgacacatccctactacaccacgatgatggcgctagcgctacagacgcggctggggctgccggaagcgcagctgtcggctcgcgcgacgtctccgattacaagggctactactcgaaaggcgcggcgggtgcgcgccttacaccgggatcacgagctggtcctgccgcgttgccctccagcagctcactcagctcccacacggggatatccaacaacgatattacggctcctccgggatttgaccgctatccggtggtcgggtctcgtgtggcatcaatggcgcccgttggcggtgctgctgccgtgggagccgccggtgcagccgctcacaatggctctcacaataattcctctgcgtccatcagctcgtcagaccccttcataagcgaccaggatttctcgccctttggaggctacccaacgtcctctttcccgctgcacctcgacgaaaaagaggacgatgattacttacacaacccagatccggaggaggaggcccgcctggacaacagcaagttcatgctagatttcaagcacatggaccgcagatctgccggtgggtttttcggcttcctgttcttattcctgggtgcgctaacgctgttcgtcgtccttcctgtgctcactttcacgggtgcggtcgaccacggtaaaccacaaactatcacatacctttcgctctacgagtacccccagttatctgctattcgtacatcgctcgtggacccggatactccaacctctgcgaaaacgtggaaggccaaggacggttccgagtggccacttgcattttcagatgagttcaatgctgaaggaagaacgttctacgatggtgacgatcagttctggactgctccagacttccactacgccgccactcacgatttggagtggtactcgccagacgctgttaccactgcaaacggtaccttgaaacttcgcatggatgcttacaagaaccacgatctgtactacagatccggtatgctgcagagttggaacaagctatgtttcacacagggttatatcgaggcctctgctaacctgcctaactacggtcgtgtgatcggtctgtggccgggtatgtggactatgggtaatctgggaagacctggctaccttgcctctaccgagggtgtgtggccttactcttacgaagcctgtgatgctggtatcactcctaaccaaagttcgcctgatggtatctcttacctgcctggccagaaactctcctcgtgtacctgtgacggcgaagaccatccaaaccaaggtgttggtagaggtgctcctgaaatcgatattattgaaggttctgctgacacatacattggagggtcaggtgttggtgtagcatctcagtcgctacaacttgctccttttgacatctggtatatgccagactacgactttattgagattcacaatagtaccgttacagcaatgaacacgtatgctggtggtccattccagcaggccgtgtctgcagttacagctctgaacgttacttggaacgagttcggaccggatgcgggctactttcaatcgtatgggtttgaatatttgaatgatcacgacaccggctatatcagatggtttgtaggtcaacaaccaacaatgaccattcattctacagctctccatcccaacggtaatattaattggaggcctattagtaaagagccgatgtctattattctaaatttgggtatctccaacaattgggcttatatcgactggaactccattttcttccctgtaacaatgagtatcgactacgtcagaatataccagcccgagaacgccacgagcataacttgcgacccttcaggcttcccaacttaccaatacatccaagaccacttgaatgtttactccaatgttaacctcacttcatgggaggacgctggctacactttccccaaaaacactttaaccggaaattgtaagagctctaagaagaataaggactactga

SEQ ID NO: 155 - protein, 504 aa, Magnaporthe oryzae
MDQERPYNGNYSSRTGSRANHRTSETPTSPNDIMTPHRASTPESPYLTATPGAASSSNPFGDGIESRASHRSSAGGHNPFGTPAMSRPASSYESGSGIGNRFEERAQRYFHSRRVRKGEVEKPWLEKRHPKEKWVTILPIIGILVGLGISGVLVWDGIRSVVKHNYCMVLDENFSGGLRDDVWTKEVTVGGFGNGEFQETTGTDENVFVEDGVLKIKATLQDETKIQQDTVIDLIKDGTCTSTLVQDCIAATNTTVGNATIVPPTRSARIHTKKGATIKYGRVEVSARMPEGDWLWPAIWMMPVDDVYGPWPRSGEIDIAESRGNDWRYAQGGNNIASSALHWGPNAANNAWWRTNNKRQALKSTYSSDFNTFGLEWSQNYLFTYINSRLLQVMYVNFDQPLYKRGNFPEAGANGTRLQDPWTQTGRSQTPFDQRFFLILNLAVGGTNGWFEDGKSGKPWLNGSPNAKKDFWEARDKWFPTWKRPQMEIRSVKMWQQCNGNEEL

SEQ ID NO: 156 - DNA, 1515 bp, Magnaporthe oryzae
atggaccaagaacgcccctataatggcaactacagcagccgaacaggctctcgtgcaaaccaccgcacctcggagacccccacgtcaccaaatgatataatgactcctcaccgcgcgagcacgccagagagcccatatctcactgccacacccggagccgccagcagcagcaatccatttggcgacggtatcgagtctcgggcttcgcatagatcttcggcaggaggccacaacccctttggcacgcccgccatgtcgcggccggcgtcaagctacgaatccggaagtgggatcggcaacaggttcgaggagcgcgctcagcggtactttcacagcaggagggtccgcaagggcgaggtggagaagccctggctcgagaagcgtcaccccaaggagaaatgggttaccatcctgcctatcattggcatcctcgtcggattgggtatctcgggcgtgctggtctgggacggcatcaggagcgtcgtaaagcacaattactgcatggtcctcgatgagaacttttcgggcggtctgcgggacgatgtgtggacgaaggaagttacagtgggcggctttggcaatggcgagttccaagaaacaactgggaccgacgaaaatgtttttgtcgaagacggagtccttaagatcaaggccactctacaagatgagaccaagatccaacaggatactgttatcgacctgatcaaggatggcacctgcacatctacgcttgtgcaagactgcattgccgccacaaacacaactgtcggaaacgcaaccatcgtcccgcccactcgctcggcccgtatccacaccaaaaagggcgctaccatcaagtacggccgtgttgaggtctcggctcggatgccagagggtgactggctctggccggcaatctggatgatgccggtcgatgatgtttacggtccctggccacgatccggcgagattgacattgccgagagccgtggcaatgactggagatacgcccagggcggcaacaacattgcgtcgtcagcgctgcactggggccctaacgcggccaacaatgcttggtggcgcaccaacaacaagcggcaagctctcaagtcaacctactcttccgacttcaacacgttcggccttgagtggtcgcaaaactacctcttcacctacatcaacagccgcctactgcaagtcatgtacgtcaactttgaccagccgctgtacaagcgcggcaacttcccagaagcgggagccaacggcacgcgtctccaggacccctggacccagacaggtcgcagccagacgccctttgaccagcgcttcttcctcatcctgaacctggccgtcggtggcaccaatggctggttcgaggacggcaagtcgggcaagccgtggctgaacgggagccccaacgccaagaaggacttttgggaggcgcgagacaagtggttccccacctggaagcgcccccagatggagattcgcagcgtcaagatgtggcagcagtgtaacggaaacgaggagctgtag

SEQ ID NO: 157 - protein, 472 aa, Marssonina brunnea
MENESRHRGSAVSGNNSAATTPMRPGTPESRSGPFGDEISPAPPLNPFGTPYTSRPASSVGSSSAVRSLPTRYFHSRRVRKGEVEKPWMDKKDPKEKWVTIIPLIGLLLGFGVAGFLVYDGLSSVVKHTYCPVMTDDFSSGSLNTDIWTMEAEVGGFGNGEFAQTTSDGKNVYIENGKLIIKPTLQDASLIEQNSVVNLTKDGTCTYDASRGSLDAKLKACAAVTNLTTGEIVPPVLSGRINTKKGATIRYGRVEVTAKMPSGDWLWPAIWMLPVNETYGPWPLSGEIDIAESRGNNHTYEQGGNNIVSSALHWGPDSANDAWWRTNVKRSALHTTYAKTTHTFGMEWSEKYLFTYINTRLLQVLYTNFNKPLWERGSFPLSDSNGTRLVDVWSQTGRDQTPFDQDFYLILNVAVGGTNGWFEDGKSEKPWLDTSTTAARDFWSQRDQWLPTWQEKGAGQMEVSKVQMWQQC

SEQ ID NO: 158 - DNA, 1419 bp, Marssonina brunnea
atggagaacgagtcgcgacacagagggagcgccgtctcgggcaacaactctgccgcgacgacgccaatgcgtccagggacgccagagagcaggagtggcccattcggcgatgagatctcccccgcgcctccactaaatccattcggaaccccgtatacctcgagaccagcatcctcagtcggctcctcttcagcggtgcgatcactgccgaccagatacttccactcgcgacgagtgcgcaagggcgaggtcgagaagccatggatggacaagaaggaccccaaggagaaatgggtcacgatcattcctctgatcggcttgctgttaggatttggtgtcgcggggtttctagtctacgacggtctttcttccgtcgtcaagcacacctactgcccggttatgacggacgatttctccagtgggagcttgaacactgatatctggacaatggaggcggaggtgggtggtttcggcaacggtgaattcgcgcagaccaccagcgacggtaagaacgtctacatcgagaacggcaagctcatcatcaagcccaccctccaagatgcgagcctcatcgagcaaaacagcgtcgtcaacctcaccaaggacgggacctgcacatacgatgcttccagagggtccctcgacgctaaactcaaggcctgcgccgccgtgaccaacctcactacgggcgagatcgtgccccccgtcctctctggccgcatcaacaccaagaaaggcgcaaccatcagatacggccgcgtagaggtgacggccaagatgccctcgggtgactggctctggcccgccatctggatgctgcccgtaaacgagacgtacgggccgtggcctctgtcgggagagattgacattgccgagtcccgcgggaacaaccacacttacgagcaaggtgggaacaacatcgtctcctctgctctgcactggggccccgactcagcgaacgatgcctggtggcgcaccaacgtcaagaggagcgctctccacaccacctacgcgaagaccacgcacaccttcggcatggagtggtccgagaaatacctcttcacctacatcaacacgcgcctcctgcaggtcctctacaccaacttcaacaagcctctctgggagcggggtagcttccctctgtccgattcgaacggcacgcggctcgtggacgtctggtcccagaccggtcgcgatcagacacctttcgatcaggatttctacctgatcttgaacgtggccgttggtggcaccaatgggtggttcgaggacggcaagagtgagaagccgtggctcgacaccagcaccacggccgcgagggacttttggagccagcgcgatcagtggctcccgacgtggcaggagaagggggctggacagatggaggtcagtaaagtgcagatgtggcagcagtgctag

SEQ ID NO: 159 - protein, 485 aa, Myceliophthora thermophila
MDNNNDSFGRPATNNMPSMASTAAPTPQRPGTPNESVGRNPFGDGVESQASHRSFGQNGNPFASPSFSRPPSSFDSSSALGRFEGGGARYFHSRRVRKGEIEKPWTKQSDPKEKWVTILPIIGIIIGLGISGFLVWDGIRSVVKHKYCPVLIEDWSQGFNEKVWMKEVQVNGFGNGEFEQTTGGDENVFIENGNLIIRATPRDDALMQQNYKIDLLKDGTCTSTNPANCIAATNITTGNSSIVPPVLSGRINTRRGASIKYGRVEVTAKLPAGDWLWPAIWMMPVDSKYGPWPASGEIDIMESRGNNYTYPQGGNNIMSSALHWGPNPANDAWWRTNVKRQALHTTYSAGFNTFGVEWSQKYLFTYVNSRLLQVLYVNFDVPMWSRGNFPVQDSNGTRIDDIWGHTGRPQTPFDQPFYLILNLAVGGTNGWFEDNVNGKPWLDRSPNARKDFWQAKDRWLPTWTQPQMEVSKVVMLQQCDGDEDL

SEQ ID NO: 160 - DNA, 1458 bp, Myceliophthora thermophila
atggataacaacaacgactccttcggccgcccggccaccaacaatatgccctcaatggcatccaccgccgctccgacccctcaacggcccgggacgcccaacgagtctgtcgggcgcaacccctttggcgacggtgtcgagtcgcaagcgtcgcaccggtcgttcggtcagaacggcaacccctttgccagcccttcgttctcgcggccccctagtagcttcgactcgtcctcggcactgggccgcttcgaaggcggcggcgcgcgttacttccactcgcgccgcgtgcgcaagggcgagatcgagaagccatggaccaaacagtccgaccccaaggaaaaatgggttaccatcctgcctatcatcggcatcatcatcgggttgggtatctcgggcttcctggtgtgggacggcatccgcagcgtggtcaagcacaagtactgtcccgttctcatagaggattggtcccaaggcttcaacgagaaggtgtggatgaaggaggtgcaggtgaacgggttcggaaacggcgagtttgagcaaaccacggggggcgacgagaacgtgttcattgagaacggcaacctcatcatcagggcgacacctcgtgacgacgcgttgatgcaacagaactacaagatcgacctcctcaaggacggcacctgcacgtccaccaacccggccaattgcatcgccgccactaatatcacgaccggcaactcgtccatcgtgcctccagtcctctcgggccgcatcaacacgcggcgcggtgcctccatcaagtacggccgggtcgaggtgacggccaagctgcccgccggcgactggctctggccggccatctggatgatgccggtcgactccaagtacgggccgtggccggcgtcgggcgagatcgacatcatggagtcgcgcggcaacaactacacctacccgcagggtggcaacaacatcatgtcatcggcgctccactgggggccgaacccggccaacgacgcctggtggcgcaccaacgtcaagcggcaggcgctgcacacaacctactcggccgggttcaacacgttcggggtcgagtggtcgcaaaagtacctcttcacctacgtcaactcgcgcctgctgcaggtgctctacgtcaacttcgacgtgcccatgtggtcgcgcggcaacttccccgtccaggacagcaacgggacgcgcatcgacgacatctggggccacacgggccggccgcagacccccttcgaccagcccttctacctcatcctgaacctggccgtcggcggcaccaacggctggttcgaggacaacgtcaacggcaagccctggctcgaccgctcgcccaacgcccgcaaggacttctggcaggccaaggaccgctggctgcccacctggacgcagccgcagatggaggtgagcaaggtcgtaatgttgcagcagtgcgacggagatgaggatctctag

SEQ ID NO: 161 - protein, 483 aa, Metarhizium acridum
MEQDPYNHGYYGHPVPSATTTVNPTPIRSGTPNTDNSRSLFGENDAASLNRPGRGTNPFTSLDASRPASSFGSSSAMGPRYDVISQLYFHSRRVMKGEVEKPWLEKKDPKEKWVTILPIIGILIGLGISGFLVWDGIRNVVHHKYCPVLDDNFDGGFNTNVWTKEVQVGGFGNGEFEQTTGGDENVFVQNGNLVIKATLQDAEKVEKDNVINLLKDGTCTSKDWYSCVAATNTTTGNSSVVPPTKSGRINTMKGAKLKYGRVEVTAKLPEGDWLWPAIWMMPVKDTYGPWPASGEIDIMESRGNNWTYEQGGNNIMSSALHWGPDPANDAWWKTNNKRQALHTTYGSGFNTYGLEWSQKYLFTYVNSRLLQVLYTNFDKPLWNRGGFPDANSNGTRLKNTWSETGRPNTPFDQEFYLIINLAVGGTNGWFEDGKSGKPWLDRSPSARKDFWNARDTWQATWKQPQLEVSRVLMMQQCDGNEEL

SEQ ID NO: 162 - DNA, 1452 bp, Metarhizium acridum
atggagcaagatccgtataaccacggctactatggccatccagtaccatctgctacaacaaccgtcaatcctacgccaatccgatccggaactccaaacacagacaatagccgcagccttttcggcgagaatgatgcggcatccttgaaccgtcctggaagaggcacgaatccatttaccagcctcgatgcatcaaggccggcatccagcttcggctcctcaagcgccatggggcctcgatatgatgtcatttcccagctctacttccattccaggcgagtaatgaagggcgaagtcgaaaagccttggttggagaagaaggatcccaaggagaagtgggttaccattctgccaatcatcggcattttgattggcttgggtatttctggatttttggtctgggacggcattcgcaatgtcgtgcaccacaaatactgccctgttttggatgataactttgacggcggcttcaataccaacgtttggaccaaggaagtccaagttggcggctttggcaacggcgagttcgagcagaccactggaggtgacgaaaatgtctttgttcaaaatggcaacctagtcatcaaggccactctccaagacgccgaaaaggtggagaaggacaacgtcattaacctgctcaaggacgggacctgcacgtctaaagattggtacagctgcgtggctgccaccaacaccacgacgggcaactccagcgtcgtccctccaaccaaatccggtcgcatcaacaccatgaagggcgccaagctcaagtacggccgcgtcgaggtcacggccaagctccctgaaggcgactggctttggcccgccatctggatgatgcccgtcaaggacacgtacggcccgtggcctgcgtctggagagattgacatcatggagtctcgaggcaacaactggacctatgagcaaggcggcaacaacatcatgtcgtcggccctccactggggtccagatcccgccaatgatgcgtggtggaagaccaacaacaagcgccaggccctgcacacgacctacggcagcgggttcaatacgtatggcctcgaatggtctcagaaatatctcttcacctatgtcaacagccgtctgctccaggtcttgtacaccaactttgacaagcccctttggaatcgtggaggcttccccgacgccaactccaacggcacacggttgaagaacacgtggagtgaaacgggccggccgaacacgccattcgaccaagagttttatcttattatcaacctggccgtcggtggcaccaacggctggtttgaggatggcaaatccggcaagccgtggcttgaccggtcacccagtgcgcgcaaggacttctggaacgccagggacacttggcaggcgacgtggaagcagcctcagctggaagtcagtcgcgtgttgatgatgcagcagtgcgatggtaatgaagaattgtaa

SEQ ID NO: 163 - protein, 483 aa, Metarhizium anisopliae
MEQDPYSHGYYGHPVPSATTTVNPTPIRSGTPNTENSRTPFGDNDTASLNRPGRGTNPFTSPDASRPASSFGSSSAMGPRYDVNSQLYFHSRRVMKGDIEKPWLEKKDPKEKWVTILPIIGILIGLGISGFLVWDGIRNVVHHKYCPVLDDSFDGGFNTNVWTKEAQVGGFGNGEFEQTTAGDENVFIQNGNLVIKATLQDAEKVEKDNVINLLKDGTCTSKDWYSCVAATNTTTGNSSVVPPTKSGRINTMKGAKLKYGRVEVTAKLPEGDWLWPAIWMMPVKDTYGPWPASGEIDIMESRGNNWTYEQGGNNIMSSALHWGPDPANDAWWKTNNKRQALHTTYSSGFNTYGLEWSQKYLFTYVNSRLLQVLYTNFDKPLWNRGGFPDANSNGTRLKNTWSETGRANTPFDQEFYLIINLAVGGTNGWFEDGKSGKPWLDRSPSARKDFWNARDTWQATWKQPQLEVSRVLMMQQCDGDEEL

SEQ ID NO: 164 - DNA, 1452 bp, Metarhizium anisopliae
atggagcaagatccgtatagccacggctactatggccatccagtaccatctgctacaacaaccgtcaatcctacgccaatccgatccggaactccaaacacagaaaatagccgcaccccatttggcgacaatgatacggcatccttgaaccgcccgggaagaggcacgaatccgtttaccagccccgatgcatcaaggccggcatccagctttggctcctcaagcgccatggggccgcgatatgatgtcaattcccagctctacttccactctaggcgagtaatgaagggcgacatcgaaaagccttggctggagaagaaggatcccaaggagaagtgggtgactatactgccaatcatcggcatcttgattggcttgggtatttctgggtttttggtttgggacggcattcgcaacgtcgtgcaccacaagtactgccctgttttggacgatagtttcgacggcggcttcaataccaacgtttggaccaaggaagcccaagtcggcggctttggcaatggcgagttcgagcagaccactgcgggcgacgaaaatgtctttatccaaaacggcaacctagtcatcaaggccactctccaagacgctgaaaaggtggaaaaggacaacgtcatcaacctgctcaaggacggaacctgcacgtctaaagattggtacagctgcgtggctgccaccaacaccacaacgggcaactccagcgtcgtccctccaaccaaatctggccgcatcaacaccatgaaaggcgccaagctcaagtacggccgcgtggaggttacggccaagcttcctgaaggcgactggctttggcccgccatctggatgatgcctgtcaaggacacgtacggcccatggcctgcgtccggagagatcgacatcatggagtctcgaggcaacaactggacttacgagcaaggcggcaacaacatcatgtcgtcggccctccactggggcccggatcccgccaatgatgcgtggtggaagaccaacaacaagcgccaggccctgcacacgacctacagcagcgggttcaacacgtatggcctcgaatggtctcagaagtacctcttcacctatgtcaacagccgtcttctccaagtcttgtacaccaactttgacaagcccctgtggaatcgcggaggcttccccgacgccaactccaacggcacacggttgaagaacacgtggagcgaaactggtcgggcgaacacgccattcgaccaagagttttatctcattatcaacctggccgtcggtggtaccaacggctggtttgaggatggcaagtccggcaagccgtggcttgaccggtcacccagtgcgcgcaaggacttctggaacgccagggacacttggcaggcgacgtggaagcagcctcagctggaagtcagtcgcgtcttgatgatgcagcagtgtgacggtgatgaggaattgtaa

SEQ ID NO: 165 - protein, 460 aa, Macrophomina phaseolina
MSGTATTTATATPRPGTPESDRIAPAASTPRNGPPSNPFATPYGSMPASTTGSFYDIGSSGIATQRYFRSRRIKKGSVEQPWKEKTDPKAKWTTIIPIIGIFLGLGVTGVLIWDGMRNVVNHQYCPVLDDNFANGLNNQVWTKEVEVGGFGNGQFEMTTNTDENAFVQDGILHLKPTLQDQKLIDSNTVINLLDDGTCTGSSWGSCVTSTNTTNGTIVNPVKSARINTKAGANIKFGRVEVVAQLPEGDWLWPAIWMLPKNSTYGEWPRSGEIDIMESRGNNYTYPTGGNNIISSALHFGPDTASDAWWTSNVKRKALHTTYSKKFHTFGMEWSEKYIFTYVDTRLIQVMYNNFNKPFWDKGHFPLSDSNGTRLVDPWSKTDSNATPFDEDFYLIINVAVGGTNGWFKDGKASKPWVDSSETAKRDFWSTRDQWYPTWEKKGELLVKSVKMWQQKGYNGC

SEQ ID NO: 166 - DNA, 1383 bp, Macrophomina phaseolina
atgtctggcacggccaccacaacggccactgctacgccccggcccggcacgccggagagcgaccgcatagctccggccgcgtccactcctcgcaatggcccgccttccaacccattcgctacgccttacgggtcgatgcccgcctcgaccaccggctctttttacgacatcggcagcagcggcattgccactcagagatactttcgctccaggagaatcaagaagggcagcgtcgagcagccatggaaggaaaagacggaccccaaggcaaagtggacgaccatcatccccattatcggcatcttcctgggcctgggcgtgaccggcgtgctcatctgggacggcatgcgcaatgttgtcaaccatcagtactgccccgtcctcgacgacaactttgccaatggcctgaacaatcaagtctggacaaaggaggttgaggttggcggattcggcaacggccagtttgaaatgacgaccaacacggacgaaaacgcctttgtccaagacggcatcctccacctcaagccgacgcttcaggaccagaagctcattgactcgaacaccgtcatcaacctgctcgacgacggaacgtgcacgggctcgagctggggcagctgtgtcacgtcgacaaacacgaccaacggcaccattgtcaacccggtcaagtcggcgcgcatcaataccaaggcgggagcgaacatcaagttcggccgcgtcgaggtggtggcccagctgcccgagggcgactggctgtggcctgccatctggatgctgcccaagaactcgacgtacggagagtggccgcggtccggcgagatcgacatcatggagtcccgcggcaacaactacacctaccccaccggcggcaacaacatcatcagcagcgctctgcacttcggcccggacacggcgtcggatgcgtggtggaccagcaacgtcaagcgcaaggccctgcacaccacctactccaagaagttccacacgttcggcatggagtggagcgaaaagtacatcttcacctacgtcgacacgcgcctgatccaggtcatgtacaacaacttcaacaagcccttctgggacaagggccactttccgctctccgacagcaatggcacccgcctggtcgatccctggagcaagaccgacagcaacgccacgccctttgacgaagacttctatctcatcatcaacgttgccgtgggcggcaccaacggttggttcaaggacggaaaggccagcaagccttgggtcgactccagtgagacggcgaagcgggacttctggagcaccagagaccagtggtaccctacctgggagaagaagggcgagctgcttgtcaagagcgtcaagatgtggcagcagaaagggtataacggctgttga

SEQ ID NO: 167 - protein, 473 aa, Neurospora crassa
MDHRHTMDNDHREHLDPRASGRHNFDSGVESRASQRSNEGSNENPFASPIPTRPPSSFDTSSNSGGIGAHHEALPGGQRYFHSRRVRKGEVEKPWAEKKDPKEKWVTIIPLVGIFIGLAISGFLIWDGIRSVVKHKYCLVLDEDWSQGIRDSVWQHEVQLGGFGNGEFQQTTKDNAYIEDGKLVIKATLQDDKLLLSDSKVDLLASGDCTSTVYRDCVAATNTTVGNSSIVPPVLSARLNTRLGASIKYGRVEVTARLPEGDWLWPAIWMMPVNSTYGQWPQSGEIDLAESRGNNYTYPQGGNDIISSTLHWGPSSLSDAFWRTNVKRQALHTTFANKFHTFGLEWSEKYLFTYVDSRLLQVLYVNFNKPLWQRGNFPQVDENGTRTTDPWGYTGRLNTPFDQKFYLILNVAVGGTNGWFQDQSNGKPWVDSSPNAKKDFWLAKDQWFPTWKSPQMEVEKVVMWQQCDGHEEL

SEQ ID NO: 168 - DNA, 1404 bp, Neurospora crassa
atggacaacgaccaccgcgaacatctcgaccctcgggcaagcggccgtcacaactttgactcgggcgtcgagtctcgagcctcgcaacgctccaacgagggctccaacgagaacccctttgccagtcccattcccacccgtccaccatcaagcttcgacacatcctcgaactctggtggtataggagctcaccacgaagctttgcccggtggccaacgatacttccactctcgtcgagtacgcaagggcgaggtagaaaagccatgggcagagaagaaagaccccaaggagaagtgggtgacgattattcctctggtcggcatcttcattggcttggccatctctgggttcctgatatgggatgggatcaggtccgtggtgaagcacaagtactgtttggtgctggatgaggattggagtcaaggaattagggacagtgtgtggcagcacgaggtacaattgggtggttttggcaacggcgaattccagcaaaccaccaaagacaacgcctacatcgaagacggaaagcttgtcatcaaagccaccctccaagacgacaagctcctcctctccgactccaaagtcgacctcctcgcctcgggcgactgcacctccaccgtttaccgagactgcgtagcagccaccaacaccaccgtcggtaacagttccatcgtgcctcccgtcctctcggcccgcctcaacacccgtctcggcgcctccatcaaatacggccgtgttgaagtcaccgcccgcctgcccgaaggagactggctatggcccgccatctggatgatgcccgttaacagcacctacggccagtggcctcaatccggtgagattgatctggctgagtcccgcggcaacaactacacgtacccacaaggcggcaacgacatcatctcctccacgctgcactggggtccttcttccctttcagacgccttctggcgcaccaacgtcaagcgccaggccctgcacaccacgttcgcaaacaaattccacactttcggtctcgaatggtccgagaagtacctcttcacctacgtcgactcgcgcctgctgcaagtcctctacgtgaacttcaacaaacccctctggcaacggggtaacttcccgcaggtagacgagaacggcactcgcaccactgacccctggggatacacgggccgcctgaacacgccctttgatcaaaagttctatttgatcttgaatgtcgcggtaggtggaacgaacgggtggttccaggaccagtcgaatggcaagccgtgggtggattcgagtccgaatgccaaaaaggacttttggctggctaaggatcagtggttccccacgtggaagagcccgcagatggaggtggagaaggtcgttatgtggcagcagtgtgatgggcatgaggagctgtag

SEQ ID NO: 169 - protein, 482 aa, Podospora anserina
MDHQQDYYGPGQPGTVNSSAAPTPRRPGSLNDPDGRNPFGDGVESQASQRSVNNGNPFSSPSASRPPSSFDSSSAMGARYEDRGQRYFHSRRVRKGEVEKPWTKTVDPKEKWVTILPVIGIVIGLGISGFLVWDGMRSVVKHKYCPVLEEDFSRGFNSDVWMKEVQLGGFGNGEFDMTTAGDENVFVQDGKLIIKATLTDDKYILQNHTINLIDDGTCTSTEFKHCVAVTNTNNGNSSIVPPVKSGRINTKPGAAIKYGRVEVTAKLPEGDWLWPAIWMMPVKDTYGAWPASGEIDIVESRGNNYTYPQGGNNIMSSALHWGPSPAQDSWWRTNVKRPALHTTYSAGFNTFGLEWSQKYLFTYVNSRLLQVLYTNFDTRLWERGNFPSADSNGTWIRNPWEQGGQNAPFDQKFFLILNVAVGGTNGWFEDGVNGKPWLDSSENARKNFWEARNQWLPTWKSPQMEVSKVIMWQQCNGDEGDL

SEQ ID NO: 170 - DNA, 1449 bp, Podospora anserina
atggatcaccaacaagactactatggccctggccaaccaggcaccgtgaactcgagcgccgccccaacaccacgacgtccgggctcgctgaacgacccagacggacggaacccctttggcgatggtgtcgagtcccaggcttcccagagatcagtcaacaatggcaacccattctccagcccgtcggcatcccgcccaccaagcagcttcgactcttcctcggccatgggagcccgctatgaggacaggggacagcgctactttcactcgaggcgagtacgcaagggcgaggtggagaagccgtggaccaagacggttgatcccaaggaaaagtgggtgacgattctgcccgtgatcggtatcgttatcgggttgggaatttcgggcttcttggtgtgggacggcatgcgcagtgtggtcaagcacaagtactgcccagtgttggaggaagactttagccggggcttcaactctgacgtctggatgaaggaggtgcagctgggcgggttcggcaatggcgagtttgacatgactactgcgggcgacgagaacgtctttgttcaggatggcaagctcattatcaaggcgaccctgaccgatgacaagtacatcttgcagaaccacaccatcaacctcatcgatgacggtacttgcacatccaccgagttcaagcactgcgttgctgtcaccaacaccaacaacggcaactcgagcattgtgccccctgtgaagtcgggccgtatcaataccaaaccgggtgccgccatcaagtatggccgtgtcgaagttactgccaagcttcccgagggtgactggctctggcccgccatctggatgatgcccgtcaaggacacctatggagcctggcctgcgtctggcgagatcgacattgtggaaagccgcggcaacaactatacctacccgcaaggtggcaacaacatcatgtcctctgctcttcactggggtccttcccccgcccaggactcgtggtggcgcaccaacgtcaagcgccccgcgctccacacgacctactctgccgggttcaacaccttcggtctcgaatggtcgcagaagtacctcttcacctatgtcaactcgcggctcctccaggttctctacaccaactttgacactcggctctgggagcgcggcaatttccccagcgccgactccaacggaacctggatccgcaacccctgggaacagggcgggcagaacgctccctttgaccaaaagttcttcctcatcctcaacgttgccgtcggtggcaccaacggctggttcgaggacggtgtcaatggcaagccctggctggactcttccgagaacgccaggaagaacttttgggaggccagaaaccaatggcttcccacatggaagtccccgcagatggaggtcagcaaggtcatcatgtggcagcagtgcaacggtgacgagggtgatttgtag

SEQ ID NO: 171 - protein, 666 aa, Paracoccidioides brasiliensis
MPQNHLHKQQHPPKIKTSSREGQKDPFQDPSPPCYLITPPQPPYSPAYQQGSSVQTNDSLDHLAPPHYSRRYQTDKDVSMGYSNFSSRRTSWSSEGGSWESRGHLLNSSGKYWDHSRVSSVAEDEINTQTVVEKYAIMPDYDNLLVYPEDVEKDDYLHNPDPSDSDRDCEVCSRRGILNIAGLIIVLLGAMTLFIIYPLLTFFDKLKEGDKPTCTDDSCLDVGPIPHLQNLRTSLIDPDTPQSVRSITSSSGKQWKLVFSDEFNKDGRTFYDGDDPFFQAVDIWYGVTQDLEWYDPDAITTRNGKLEIRFDAFKNHGLDYRSGMLQSWNKLCFTGGRLEASISLPGRGDTSGFWPGFWTMGNLGRPGYAATTEGMWPYSYDDICDAGITPNQSSTDGISWLPGMRLPACTCKGEDHPNPGKSRSAPEIDVIEASVHALDPKLPSTIGDVSQSVQVAPFDVWYMPNFEFYELYNPSISSINNYRGGPYQQAVSGLTNINNKWYDGKEYQVYAFEYKPGKNGEISWFVGADKTWKLDARALGPNGNVGQRVIPVEPMALILNFGMSKTFAPLNLTGLAKLMPATMRFDYIRIYQDPDKESVTCDPTGYETTRYIRTHLDAYNNPNKTRWWSTRVIRGPKIHTCIDAMFDSSRPNPTLHLYRRNNERTC

SEQ ID NO: 172 - DNA, 2001 bp, Paracoccidioides brasiliensis
atgccgcaaaatcatctccataaacaacaacatccacccaaaatcaaaacgagttccagagagggccagaaagatccgttccaagacccttcccctccttgctacctaatcacccccccacagcctccatactctcccgcataccaacaaggttcgtcagttcaaaccaacgactctctagaccacctggcccctccacattactcccgtcgctatcaaactgacaaagatgtctcgatgggatattcaaatttctcctcgcggaggacaagctggagctcagaaggtgggagttgggagagtcgcgggcatcttctgaattcgtctgggaagtattgggatcactccagagtaagcagtgtcgctgaggatgaaataaatactcagactgtcgtggagaaatatgctataatgcccgattatgataatctgctggtttatcccgaggatgtggaaaaggacgattatctgcataacccggacccgtcagattcggatcgggattgtgaagtgtgctcacggagaggcattttgaatatcgctgggcttatcattgtgcttcttggcgctatgacgcttttcatcatttatccccttttgacgttcttcgacaaactgaaggagggagataaaccgacttgcacggatgactcgtgtttggacgttggtcccattccgcatcttcaaaatcttcgaacatcacttatcgatccggatacgccgcagtctgtgagatctattacgtcttcgagtggaaagcagtggaagttggtgttttccgacgagttcaacaaagatggacgcacattctacgatggggacgacccgttctttcaggcggttgatatttggtatggagtgacgcaggatctagagtggtacgacccggacgcgataacaacgagaaacggaaaactcgaaattcgattcgatgctttcaaaaaccatggtctggattatcgctccggcatgctccaatcctggaataaactatgttttactggtggccgcttagaagccagcatctctcttccaggacgtggcgacacatcaggtttctggccagggttttggacaatgggcaatctgggccgtccaggctacgctgcgactacggaaggaatgtggccgtatagctacgacgacatatgcgatgccggcattacgcccaaccagagctcgacggatggtattagttggctgcctggcatgcggctgccagcctgcacttgcaagggagaggatcacccaaacccgggcaagtcgcgaagtgcccccgaaatcgatgttattgaagcaagtgtgcacgccctggatccaaagttaccgtcaacgataggtgatgtgtcgcagagtgtacaggtcgctccgtttgatgtgtggtatatgcctaactttgaattctacgaactctacaacccgtccatctcctccataaacaactatcgaggtggaccataccaacaagccgtatcaggcttaacaaatataaacaacaaatggtacgacggcaaagagtatcaagtctacgccttcgaatacaaacccggcaaaaacggagaaataagttggttcgttggtgccgacaagacatggaagctagacgctcgtgccctgggacccaacggtaacgtagggcagcgtgtcatccccgtcgagcccatggcgcttatattgaactttggaatgtccaagacattcgcaccgttgaatttgaccggattagcgaagttgatgccggcgacgatgcggtttgattatatcaggatttatcaagatccggataaggagagtgttacgtgtgatccgactggctatgaaacgacgaggtatattcggacccatctggatgcttataataatccgaataagacgagatggtggagcacacgcgttatccgtggcccaaaaattcatacatgcatagatgcaatgtttgactcaagtcgacccaatccgacactacacctatatcgacgcaacaacgaacgcacatgctaa

SEQ ID NO: 173 - protein, 785 aa, Pyrenophora tritici-repentis
MAMPGKPESYTSSEYSDTRTGRPIEQRRRSWSSSSVEKEAASPSQARTEGATEQVRAAEQPLITHNGSSQHSASDAGLDFGILPSAELSSSPLPFAPIVPSPLNPAFSRSSSNESLEGKDVISSDDTRPNARRTPTTGGLLHVRRPPWPHLRPLQTRSTPDVRGQVPRSSGTQLTLNDLGTDYTRYFNPFSDSASTHSRSRRTSMSERCSHSQFGVHPGATTPPPGALSVNPFLTPDASTAGLHQHDNSVFDPERNASFVDDRLTAPYEEKGLASWPLVCDQEEADDEMHMPRDDDDIKFRPSIRDHFTKDSIASTIGLAVMISGLLFTFIGLPVLSALKIIEYNSSYGVPLSMFPTPWKSQPWATVNNRKYPLLANMRTGLIDPDTPQGVKTRTGEFGDEYVLVFSDEFNDNSRTFYEGDDPYFYAPNIWYGATQDQEWYDPDAVTTQDGTLQLRLEEFFNHNLRFRSGMLNSWNQLCFKGGIFEVSVSLPGPAGIQGLWPGAWTMGNLGRPGYLSTTDGLWPYTYQACDVGITPNQSSPDGLSHLPGQRLSSCTCPGEDHPTPGTGRGAPEIDIIEVGASSGPQGHPIATQSYQVAPFDIYYYPNYNFTACPDTRLSGYNTYTGGAFQQAISATTVLNKDWFDNKQYQRYSFEYAPGEGEEAFISWKVGNQTMFMMDGRAIGANGNIQARQITEEPMSLILNLGISNSWTWIDWKDLVFPTTIRFDYVRWYQKKGEEMVTCDPPGFETTEYINKHPKAYNNPNYTTWDQTGYGWPKHKLNNNC

SEQ ID NO: 174 - DNA, 2358 bp, Pyrenophora tritici-repentis
atggcaatgccagggaaacccgagtcttacacgtcgtcggaatactcggatacgcgcactggacggccaattgaacagcgacggcggtcctggtcgagctcaagtgtagagaaggaagccgcgagtccgtcccaggcaaggacagaaggagctaccgagcaagttagggcagccgaacagccactaatcacacacaatggcagcagtcagcactcggcttcggacgccggtctagatttcggcatcctcccatcggcagagctctcctcttcgcccctacccttcgcacccatcgtaccgtcaccattgaatcccgccttttcccgatcctcaagcaatgagagtctagaaggaaaagatgtcatatccagtgatgacacacggccaaatgctcgtcgcactccgaccacgggaggccttcttcacgtacggcgcccaccatggcctcacctgcgacccctacaaaccagaagcacaccagatgttcggggccaggtccctcgctcttctggtacccagctcacgctgaatgatttgggtaccgattacactcgatacttcaatcctttttcagacagcgccagcacacacagtcgcagccggagaacttccatgtcagaacggtgctcccacagccagtttggcgtccatccaggcgcaaccacaccacctcccggcgcactatctgtgaatccatttctcacacctgacgcctctacagcaggccttcaccaacacgacaacagtgtctttgacccagaaaggaacgcatcttttgtcgacgatcgcttgactgcaccctatgaggagaagggcttggcatcttggccattggtgtgcgatcaggaagaggcagacgatgaaatgcacatgcctcgcgatgatgatgacatcaagtttcgcccatcgatacgcgaccatttcacaaaagacagcattgcgtccacgattggcctagcagtcatgatatctggcttactgttcacattcatcggacttcccgtgctttctgccctcaagattatcgagtacaactcatcttatggcgtgccactgagcatgtttcccaccccttggaagtctcaaccgtgggctacagtcaacaaccggaagtacccgttattggccaatatgaggacaggcttgatcgatcctgatacccctcaaggtgtcaagacgaggaccggtgagtttggcgatgagtacgtattagttttcagcgatgaattcaacgacaacagccgcaccttctatgagggagatgacccatacttctatgctcccaatatctggtatggtgcgacacaagaccaagagtggtatgatccggacgctgtaactacccaagacggcacactgcaactgcggctggaggaatttttcaaccacaacctcaggtttcggtctggtatgctgaacagctggaatcagttatgcttcaaaggcggcatattcgaagtatccgtctctctcccggggcctgcaggcatacaaggcttgtggcctggtgcgtggaccatgggtaaccttggacggccaggctatttgagtaccacggatggcctttggccatacacataccaagcatgcgatgtaggcatcacgccaaaccaatcaagtccagatggtctatcccacctccctggacagaggttgtcgtcgtgcacctgcccgggtgaagatcaccctacgccagggaccggaagaggcgcacctgaaattgatatcattgaagtcggagccagctcaggcccccaagggcatccgattgcaacccagagctatcaggttgctccattcgatatttactattatccaaattataacttcacagcctgcccagatacacggctgagtggatacaacacttacactggtggcgcattccagcaggctatatccgcgactacggttctgaataaggattggttcgacaataagcaatatcaacgctactcctttgagtacgcacccggcgaaggcgaggaagctttcatatcctggaaagtgggcaatcagacaatgttcatgatggatggccgtgctatcggggccaatggcaacatacaagcgcgacaaataacagaggagccaatgtcgctgatcctcaatcttgggatcagcaattcgtggacttggattgactggaaagatttggtgtttccaacaactatccgtttcgactacgtcaggtggtatcagaagaagggcgaagagatggtgacgtgcgaccccccaggtttcgaaactaccgagtacatcaacaagcacccaaaagcttacaacaatcccaactacactacttgggatcaaacgggctatgggtggccaaagcacaagctcaacaacaactgctga

SEQ ID NO: 175 - protein, 478 aa, Phaeosphaeria nodorum
MSNHNPEKRSEELGTPEQMSSKSAASDIHPTDTVHEAENPFATPGTQTPNAAATSRVPFSESRPESLTGSSGATSGYQYFPRGEYFRSRRIKKGEIERPWLDKKDPREKWMTIIPLIGLFLGLCVVGILVWDGVRSVAQHKYCEVLNDDFTTWNSNVWTKEVEVGGFGNGQFEMTTNSDENVFVKDGVLTIMPTLQDSSILDTNHVIDLRGQGCTGSKWTDCVTSTNTTNGTIISPVKSGRINTKLGASIKFGRVEVLAKLPAGDWLWPAIWMLPRDNVYGEWPRSGEIDIMESRGNNFTYKQGGNNIASSTLHFGPDGDNDGWWRNNVKRKALHTTYASDYNVYGVEWSEKYIFTYINSRLLQVMYTHFDEPFWSYGKFPLADSNGTRLQNPWAQTNSNTSPFDQDFYLVINVAVGSTNGWFQDGGAGKPWLDGSPTAKKDFWSAKDQWYPTWQDGGQMEVKSVKMWQQSGYNGCTA

SEQ ID NO: 176 - DNA, 1437 bp, Phaeosphaeria nodorum
atgagtaaccacaatcctgagaagcgctctgaagagctcggcacaccagaacaaatgtcgtcaaagtcggctgcgagcgatatccatccgaccgataccgtgcacgaggcggaaaatcctttcgcaaccccaggcactcagactccaaatgctgctgctacttcaagagttcccttctcggagtccaggccagagagcttgaccggctcaagtggcgctacgtcgggctaccagtactttccacgaggagagtattttcgatctcggcgtatcaagaagggcgagattgagcggccctggcttgacaagaaagatcccagggagaagtggatgaccatcataccactcatcggtctcttccttggactctgtgtcgtcggtatacttgtctgggacggcgtccgcagcgtggcacagcacaagtattgtgaggttctcaacgatgacttcaccacatggaacagcaatgtatggacgaaggaagttgaagttggcggcttcggcaacggacagttcgagatgacaactaactcggatgagaacgtcttcgtcaaggacggagtactcacgatcatgccgacgttgcaggactcaagtatattggacaccaaccacgtcatcgatctgcgtggtcaaggttgtactggctccaagtggaccgactgcgtgacgtcgaccaacacgactaacggcacaatcatcagcccagtcaagtctggtcgtatcaatactaagctgggtgcttcgatcaagttcggccgtgttgaggttctcgctaaacttccagccggagactggttatggcctgcgatttggatgttaccacgagacaatgtctacggagagtggcctcgctccggtgaaattgatatcatggagtctcgtggaaacaacttcacctataagcaaggtggaaacaacatcgcgtccagcactttgcacttcggccccgatggtgacaacgatggctggtggcgcaacaacgtcaagcgcaaggcccttcacactacttatgcttctgactacaacgtctatggtgtcgaatggagcgagaaatacatcttcacatacatcaactcacgcctcctgcaagttatgtacacacactttgatgagcctttctggtcttatggcaaattcccactcgccgactccaatggcacgcggctgcaaaacccatgggcgcagaccaacagcaacacttcaccatttgaccaagacttctatcttgtgatcaatgtggctgtaggatcaacaaatggttggttccaggatggcggcgctggcaagccatggctggacggtagtcctaccgcgaagaaagatttctggagcgcgaaggaccaatggtaccctacgtggcaggacggaggtcagatggaggtcaagagtgtaaagatgtggcagcagagtgggtacaatggttgcaccgcttaa

SEQ ID NO: 177 - protein, 720 aa, Saccharomyces cerevisiae
MPLRNLTETHNFSSTNLDTDGTGDDHDGAPLSSSPSFGQQNDNSTNDNAGLTNPFMGSDEESNARDGESLSSSVHYQPQGSDSSLLHDNSRLDLSQNKGVSDYKGYYSRNNSRAVSTANDNSFLQPPHRAIASSPSLNSNLSKNDILSPPEFDRYPLVGSRVTSMTQLNHHGRSPTSSPGNESSASFSSNPFLGEQDFSPFGGYPASSFPLMIDEKEEDDYLHNPDPEEEARLDRRRFIDDFKYMDKRSASGLAGVLLLFLAAIFIFIVLPALTFTGAIDHESNTEEVTYLTQYQYPQLSAIRTSLVDPDTPDTAKTREAMDGSKWELVFSDEFNAEGRTFYDGDDPYWTAPDVHYDATKDLEWYSPDASTTVNGTLQLRMDAFKNHGLYYRSGMLQSWNKVCFTQGALEISANLPNYGRVSGLWPGLWTMGNLGRPGYLASTQGVWPYSYESCDAGITPNQSSPDGISYLPGQKLSICTCDGEDHPNQGVGRGAPEIDVLEGETDTKIGVGIASQSLQIAPFDIWYMPDYDFIEVYNFTTTTMNTYAGGPFQQAVSAVSTLNVTWYEFGEYGGYFQKYAIEYLNDDDNGYIRWFVGDTPTYTIHAKALHPDGNIGWRRISKEPMSIILNLGISNNWAYIDWQYIFFPVVMSIDYVRIYQPSNAISVTCDPSDYPTYDYIQSHLNAFQNANLTTWEDAGYTFPKNILTGKCTSSKFKLSS

SEQ ID NO: 178 - DNA, 2163 bp, Saccharomyces cerevisiae
atgcctttgagaaatctaactgaaacgcacaactttagtagcacaaacctggacacagatggtacaggcgacgatcatgatggtgctcctctttcctcatctccttcttttggacaacaaaatgacaatagcaccaacgataatgctggtctcacaaacccttttatggggagtgacgaagaatctaatgcgcgggatggagaatctctgtcttcttctgttcattatcagccacaggggagtgactcttcactacttcatgacaattctcgtctagatctaagtcaaaataaaggtgtatctgattacaaaggttactattccaggaacaatagtagagctgtgagtacggctaatgataactcatttcttcagccaccacatagagctatagcctcttctccttctttgaattctaatttatcgaagaatgatattctctcaccgccagaatttgatagatatcccttagtgggttccagagtcacttctatgactcaactgaaccatcatggtcgctcgccaacatcatctccaggaaacgagtcgtccgcctcattctcttctaatccgtttttgggcgagcaagatttttctccatttggtgggtatcctgcttcatcgttcccacttatgatagatgaaaaggaagaagatgattatttacacaatcctgaccccgaagaagaggcaagactggatagaaggaggttcatagatgacttcaagtacatggataaaaggtctgctagtgggctagctggtgtattgctcttgtttctggcagccatctttatttttattgttttgccagcgttgacctttaccggtgctattgatcacgaaagcaacactgaagaagttacatatttaactcaataccaatatcctcaactatccgccattagaacatctctggttgacccagacacacctgatacagcgaagacaagagaagctatggatggctctaagtgggaattagtattttctgatgagtttaatgcagaaggcagaacattttatgatggggatgatccatactggacagcccctgatgttcactatgatgctactaaggatttagaatggtacagtccagacgcttccacaactgtgaacggaaccttgcagctgagaatggatgcctttaagaaccatggcttatattacagatcaggtatgttgcagagttggaataaggtttgtttcacgcagggtgctctagaaatctctgcaaatctaccaaattatggccgtgtttcaggtttgtggcccggtctttggactatgggtaatttagggaggcccggttatttggctagtacccaaggtgtctggccttattcttatgaatcgtgtgatgctggtattacacccaaccaaagttccccggatggtatttcttacttgccgggacaaaagttaagtatttgtacttgtgatggtgaagatcatccgaatcaaggtgttggtagaggagctccagaaattgatgttttggaaggtgaaactgatactaagattggtgtaggtatagcctctcaatccttgcaaattgcaccttttgatatctggtacatgcctgactatgattttatcgaggtttacaatttcacaacaacgaccatgaacacttatgctggcggtccatttcaacaagccgtatctgctgtctcaactttgaacgtaacttggtatgaattcggtgagtacggtggctactttcaaaaatatgccattgagtatctgaacgatgacgacaatggttatatccgttggtttgttggtgatactccaacttatactattcatgctaaagccttacatcctgatggtaatattggttggagaagaatcagtaaagaaccaatgtcgattattctaaatctgggtatttccaacaattgggcttatattgattggcagtatattttcttcccagtggttatgtcgattgactatgttagaatataccaaccaagtaatgctatatccgtgacatgcgatccaagtgactatccaacatatgattatattcaatcgcacttaaatgcattccagaatgcaaacttaactacttgggaagatgctggttacacgttccctaagaatatcctaactggtaaatgtactagctcgaagttcaagttatcctcttaa

SEQ ID NO: 179 - protein, 720 aa, Saccharomyces arboricola
MPLRNLTETHNFSSTNLDTDGTDGGRDPSSLSPSPSFGQQNVKNAENNAGLTNPFMGSDEDSNGRDEDSLSSSVHYQPQGSDSSLLHNNSRPDVSQNNGISDYKGYYSKNNSRVVSTANDNSFLQPPHRAIASSPSLNSNLSRGDILSPPEFDRYPMVGSRVTSMTQLNNHGRSPSSSPGNESSATFSSNPFLGEQDFSPFGGYPASSFPLMMDEKEDDDYLHNPDPEEEARLDKRRFIDDFKYMDKRSASGLVGVVLLLLAGVFIFIVLPALTFTGAIDHETTTEEVTYLTLYQYPQLSAIRTSLVDPDTPDSAKTREAMDGSKWDLVFSDEFNAEGRTFYDGDDPYWTAPDVHYDATKDLEWYSPDASTTANGTLQLRMDAFKNHGLYYRSGMLQSWNKVCFTQGALEISANLPNYGRVSGLWPGLWTMGNLGRPGYLASTQGVWPYSYEACDAGITPNQSSPDGISFLPGQKLSICTCDNEDHPNQGVGRGAPEIDILEGETDTKIGVGVASQSLQIAPFDIWYMPDYDFIEVYNFTTTTMNTYAGGPFQQAVSAVSTLNVTWYEFGEYGGYFQKYAIEYLNDDDDGYIRWFVGDDPMYTIHAKALHPDGNIDWRRISKEPMSIILNLGISNNWAYIDWQYIFFPVVMSIDYVRLYQPSNAVSVTCDPTDYPTYDYIQSHLNAYENANLTTWEAAGYTFPKNILTGNCDSSKFQLSS

SEQ ID NO: 180 - DNA, 2163 bp, Saccharomyces arboricola
atgcctttaagaaatctgacggaaacacacaactttagtagcacaaatctggacacggatggtacggatggcggccgtgatccttcttctctttctccatcaccatcttttggacaacagaatgtcaagaatgccgagaacaatgctggcctcacaaacccttttatgggtagcgacgaagactctaatgggcgggacgaagactctctctcttcttctgtgcattatcaaccgcagggaagtgattcctcactacttcataacaactctcgtccggatgtaagtcaaaataatggtatatctgattacaaagggtactattcgaaaaataacagtagggttgtgagcacggccaatgataactcgtttcttcaaccgccacatagggctatagcttcatctccctctttgaattccaacttatcaagaggtgacattctctcccctccagaatttgataggtatcccatggtgggttcgagagtgacttctatgacccaactgaacaatcatggtcgttcaccatcgtcatctccaggtaatgaatcatctgcaacgttttcttctaatccttttttgggtgaacaggacttttctccattcggcggatatcctgcctcatctttcccactcatgatggatgagaaggaggatgatgactatttgcacaatccagatcctgaagaagaagcaagactagataaaagaaggttcatagatgatttcaagtacatggataaaaggtctgccagcgggcttgttggtgtagtgcttttattattggctggtgtcttcattttcattgtcttaccagcattgactttcacaggtgctattgatcacgaaaccacaactgaagaggtcacatacttgactctatatcaatatcctcaattatctgctattagaacatctctggtagatccagacacacctgattctgcgaagacaagagaagccatggatggctctaaatgggacttggtgttttctgatgagtttaatgcagaaggaaggacattttatgacggggatgatccatattggactgcccctgatgttcattatgatgccactaaggatttagaatggtatagtccagacgcttccactactgcgaacggtactttgcaattgagaatggacgctttcaagaaccatggtttgtactatagatctggtatgctacaaagttggaataaagtttgtttcactcaaggtgctttagaaatatctgcaaatctgcccaattatggtcgtgtttcagggttatggcccggtctttggacaatgggtaatttaggtaggcccggttatttggccagtactcaaggtgtctggccctattcttatgaagcatgcgacgctggtatcacaccaaatcaaagttcaccagacggtatttctttcttaccaggtcaaaaattaagtatctgtacctgtgacaatgaagaccatcccaatcaaggtgttggtagaggagctccagaaatcgatattctcgagggtgagaccgacaccaaaattggtgtaggtgtagcctcccaatctttacaaattgcaccttttgatatctggtatatgcctgactacgattttattgaagtttataatttcacaacaacaacaatgaacacttatgctggtggtccatttcaacaagccgtgtctgctgtttccactttgaatgtaacctggtatgaattcggtgaatatggtggatatttccagaaatatgccattgagtatttgaacgatgacgatgatggttacatccgctggtttgttggtgatgatccaatgtatactatccatgctaaggctctacatcccgatggtaatattgattggagaagaattagtaaagaaccaatgtcgatcatattgaacttgggtatttctaataattgggcttatattgattggcagtatattttctttccagtggtcatgtcaattgactatgttagattatatcaaccaagtaatgctgtgtcagtgacatgcgatccaactgattatccaacgtatgattatattcaatcgcacttaaatgcatacgaaaatgcgaacctcactacttgggaagctgcaggttacacgttcccgaagaatatcctaactggtaattgtgatagttccaaatttcaattatcttcgtaa

SEQ ID NO: 181 - protein, 763 aa, Saccharomyces cerevisiae
  unsure (340)..(340): Xaa is not known
MSVRNLTNNRHSNSENSVSGSENSFYSSNEQSRQSSSLEPADGQNVRVSGNPFLGSEEFDEDYNSPSGDDERRGANEYSSSSSINYNNDPNSDTSLLANEKNSPERNGQRMSDYKGYYAKTNLTSANNLNNHNNNNYKNIISSSNDNSFASHLQPPDRNLPSHPSSNNMSSFSNNSLIKSPPPFDRYPLVGTRHISAAQSQSQNLINEKKRANMTGSSSSAHDSSLSSTNLYMGEQDFSPFGGYPASFFPLTLDEKEDDDYIHNPNVEEEAKLDRRRFVDDFKHMDRRSFLGLLGILFLFMAGIFIFIVLPAITFSGVVYHHEHVHAANSAGSSSSNTTXKSLTEYQYPQLAAIRTTLVDPDTPDSAKTRVAKDGSKWQLVFSDEFNAEGRTFYDGDDQFWTAPDIHYDATKDLEWYSPDAVTTTNGTLTLRMDAFRNHDLYYRSGMVQSWNKLCFTEGALEVSANLPNYGRVTGLWPGMWTMGNLGRPGYLASTQGVWPYSYEACDAGITPNQSSPDGISYLPGQKLSVCTCDNEDHPNQGVGRGAPEIDILEGEADTILGVGVASQSLQIAPFDIWYMPDYDFIEVYNFTTTTMNTYAGGPFQQAVSAISTLNVTWYEFGEEAGYFQKYAIEYLNDDDNGYIRWFVGENPTFTLYATSLHPSGNIDWRRISKEPMSAILNLGISNNWAYIDWQYIFFPVTMSIDYVRLYQPKGSTSITCDPEDYPTYDYIQSHLNAYYNANLTDWEQAGYTFPKNNSNRRL

SEQ ID NO: 182 - DNA, 2292 bp, Saccharomyces cerevisiae
  UNSURE (1019)..(1019): s is not known
atgtctgtgcgaaacctcaccaataatcgtcattccaacagcgaaaatagtgtttccggaagcgaaaactccttttattcctcgaatgagcaatcaagacaaagctcatcattagaacctgcagatggtcagaacgttagggtgagcggtaatcctttccttggaagtgaagaatttgacgaagattataattcacccagtggagacgatgagcggcgtggggcaaatgaatattccagttcttcatccataaattataataacgatcctaacagcgatacttctcttctggctaatgaaaagaactcacccgagagaaatggtcaaagaatgtcagactataagggctattatgctaagactaacctaacttctgctaataacttaaacaatcataataacaataattataagaacattataagcagtagtaacgataatagttttgcatcacatttacagccgccggacagaaacttaccgtctcatccttcttcaaataatatgagtagcttttctaacaacagcttaattaagtctccaccaccttttgacagatatccgctagtaggaacgaggcatatttcagcggctcaatctcagtcgcagaaccttataaatgaaaagaaaagagcgaatatgactggctcatcttcttctgctcacgactcttcattatcatccaccaacttatacatgggcgaacaggatttttcgccctttggcggttatccagcttccttctttccgttaacgttggacgaaaaggaagacgatgactacattcataatccaaatgtcgaggaagaagcaaagttagatagaaggaggttcgttgacgacttcaaacacatggatagaagatctttcttggggcttctgggtattctatttttatttatggctggtatatttattttcattgtattacctgcaattacattttccggggtagtttatcatcatgaacatgttcatgcggcaaattcagcaggatcgtcgtcttctaatactacatscaagtcattgactgaatatcaatatcctcaacttgcggctataaggacaactttagttgatccagacacacctgacagtgcgaagacaagagtagcgaaagatggatctaaatggcagctggtgttttccgatgaatttaatgctgaaggtaggaccttttacgatggcgatgaccagttttggacagctcctgacatccactacgacgctacgaaagatcttgaatggtactcaccagatgccgttacaactacaaatggtaccttgacgttgagaatggatgcattcagaaaccatgacctttattacagatctggtatggtacagagctggaacaaactctgctttacagaaggtgcgttagaagtttccgcgaacctccctaattatggtcgagttacaggattatggcctggtatgtggaccatggggaacttgggcagaccaggttatttggcgagtactcaaggtgtttggccttattcatatgaagcatgtgacgctggtataacaccaaaccaaagttccccagatggtatttcttacttgccgggacaaaagttgagtgtttgtacttgtgataatgaggatcatccaaatcagggagttggaagaggcgcaccggaaatagatattttagaaggtgaagctgatacaattttgggtgttggtgttgcgtcacaatctctacaaattgctccatttgatatatggtacatgcccgattatgacttcatcgaagtttataatttcaccacaacaactatgaatacttacgctggtgggccttttcaacaagctgtctcagcaatatccactttaaatgtaacatggtatgaatttggggaggaagcaggttattttcaaaagtatgccattgaatatctcaatgatgacgacaacggatatattcgttggtttgtgggagagaaccctactttcacactatatgctacttctttacatcctagtggtaatattgactggaggagaataagtaaggagccaatgtcagcgattttaaacttaggtatttccaacaactgggcctatatcgactggcaatatatatttttcccggtgacaatgtcaatagattacgtccgattataccagccgaagggttctacgtccattacttgtgatcctgaggactacccgacatatgattatatccaaagccatctaaatgcatattataacgccaatttaactgattgggaacaggctggatatactttcccaaaaaataattctaacaggaggttgtag

SEQ ID NO: 183 - protein, 768 aa, Saccharomyces arboricola
MSVRNLTNNRNADSESSIAESGNSFYSSSGQSRQSSSVDPADHEQVAGGNPFLGSEEFDDDYSPPSEGDEQRRANDDSTSSFVNYNNEPNSDISLLVDEKNSPARNGQRTSDYKGYYARNNLTPADNFNNHNNNNNVISSSNDNSFASHLQLPDRNLPSHPSSNNMSTFSNNSLIKSPLPFDRYPLIGTRHISMAQSQSQNLINEKKRANMTGSSSSAPDSSLSSTNLYMGEQDFSPFGGYPASFFPLTLDEKEDDDYLHNPDVEEEAKLDRKRFVEDFKHMDRRSFLGLLGILFLFMAGIVIFIVLPAITFSGVVYHHEHEHGTSSVGSSSSNTTSKSLTEYQYPRLAAIRTTLVDPDTPDSAKTREAKDGSKWELVFSDEFNAEGRTFYDGDDQFWTAPDVHYDATKDLEWYSPDAVTTTNGTLTLRMDAFKNHDLYYRSGMVQSWNKLCFTEGALEVSANLPNYGRITGLWPGMWTMGNLGRPGYLASTQGVWPYSYEACDAGITPNQSSPDGISYLPGQKLSVCTCDDEDHPNQGVGRGAPEIDILEGEADTILGVGVASQSLQIAPFDIWYMPDYDFIEVYNFTTTTMNTYAGGPFQQAISAISTLNVTWYQYGEEAGYFQKYAIEYLNDDDDGYIRWFVGENPTFTLYATSLHPSGNIDWRKISKEPMSAILNLGISNNWAYIDWQYIFFPVTMSIDYVRLYQPKGSSSVTCDPDDYPTYDYIQSHLNAYYNANLTNWEQAGYTFPKNILTGGCSSSKFSLT

SEQ ID NO: 184 - DNA, 2307 bp, Saccharomyces arboricola
atgtctgtgcgaaacctcactaataatcgtaatgctgatagtgaaagtagcattgccgaaagtggaaattcattttactcctcgagcgggcaatcaaggcaaagctcatcggtagaccctgctgatcatgagcaagttgcaggtggaaacccttttcttggtagcgaagaattcgatgacgactatagcccacccagtgagggcgatgagcaacgaagggcgaacgatgattcgacatcttcgtttgtaaactacaataacgaaccgaacagtgatatttctctccttgttgatgaaaaaaactctcccgcaaggaatggccaaaggacttccgactacaaaggctattatgccaggaataacttaacccccgctgataacttcaacaatcataataataataataacgttataagcagtagcaacgataatagcttcgcctcacatttacagctgccggacagaaacttaccgtcccatccctcttcaaacaatatgagcaccttttctaataatagcttaattaagtccccactaccatttgacaggtacccattaataggaactaggcacatttcaatggctcaatctcagtcccaaaacctcatcaatgaaaagaaaagagcgaatatgactggctcatcttcttctgctcctgactcttcattatcatctaccaatctatacatgggtgaacaggatttttcaccctttggaggttatccagcttcatttttcccgttgactttggatgaaaaggaagatgacgattaccttcacaacccagatgttgaagaggaagcaaaattagatagaaagcggtttgttgaagattttaaacatatggatagaagatctttccttggtcttctaggtatcctattcttatttatggctggtatagtcattttcattgtattacctgccattacattttccggggtggtataccaccacgaacatgaacatggaacaagttcggtaggatcttcatcttcaaataccacatcaaaatcactaactgagtatcaatatcctcgacttgctgctattagaacaaccctggttgatccagacacacccgatagtgccaagacgagagaagcgaaggatggatctaagtgggaattagtcttttcggatgaatttaacgccgagggcagaacattttatgatggtgacgaccaattctggacagctcctgatgttcactacgacgctactaaggatcttgaatggtactctccagacgctgtaacaactaccaatggtaccttgacgctaagaatggatgctttcaaaaatcatgacctttattacaggtctggtatggttcagagctggaacaagctttgttttacagaaggtgctttagaggtctctgcgaatttgcctaattatggtcgtattacagggctttggcctggtatgtggaccatgggtaacttgggtaggccaggctatttggccagtactcaaggtgtttggccttactcttatgaagcatgtgatgccggtattacaccaaaccaaagttctccagatggtatttcttatttaccgggtcaaaaattgagtgtatgtacttgtgatgatgaagatcatccaaatcaaggtgttggtagaggtgcaccagaaatcgatattctagaaggtgaagctgatacaattttaggtgtgggtgtcgcctcccaatctttgcaaattgctccattcgatatttggtacatgccggattatgatttcattgaagtctataattttacaacaacaacgatgaatacatatgctggtggtccatttcaacaagctatctcggcaatctctactttaaatgttacgtggtatcaatatggagaagaggccggttatttccaaaaatatgctattgaatatctcaatgatgacgatgacggctacattcgttggtttgtcggagaaaatccaactttcacactttacgccacttctttgcatcctagtggtaatattgactggaggaaaattagtaaggaaccgatgtcggccattctgaatctgggtatctctaataattgggcttatatcgactggcaatatatatttttcccggtgacaatgtcaatagattacgtcagactataccaacctaaaggttcttcttccgtcacctgcgatccagatgactatccaacatatgattacattcaaagccatttaaatgcatattataatgctaatttaacaaattgggaacaggctggatatactttcccaaagaatatcttaacaggaggttgtagtagttctaaattttcactgacatga

SEQ ID NO: 185 - protein, 477 aa, Sclerotinia sclerotiorum
MEQQPTFRGHTPAKSNATTPSYRPGTPESRNSPFNADDSIQPSPSIERANPFITPLTSRPGSTFGASSSSIGRTYGTRYFHSRRVKKGGIDQPWRASKDPKEKWVTIIPIIGILVGLGIAGFLIYDGIRSVTHHKYCPVMSDDFSSGTLNTDIWTQEAEVGGFGNGEFEQTTLDDENVFIKDGKLIIRPTLQDAKLIESNNVINLTSAGTCSSDVLSNCVSITNTTTGTIIQPVKSGRINTKKGATIKYGRVEVTAKLPAGDWLWPAIWMLPVTDTYGAWPASGEIDIVESRGNNHTYGQGGNNIISSTLHWGPDSDNDAFWRTNVKRAALHTTYSAGFHKYGLEWSQKYLYTYIDSKLLQVLYNTFNEPLWQRGDFPDSSSNGTRIVDVWSQTGRVNTPFDQEFYLILNVAVGGTNGWFADGKSGKPWIDASATAKNDFWNARDSWYPTWTANDNQGQMEVSKVEIWQQCDGNEEL

SEQ ID NO: 186 - DNA, 1434 bp, Sclerotinia sclerotiorum
atggagcaacaaccaacatttagaggtcatacacctgcaaaatctaatgccacaacaccatcataccgacctggcacaccggaaagcagaaattctcctttcaacgcagacgatagtatacaaccttctccatcgatagaaagggccaacccgttcatcactcctctcacttcaaggccaggttctacttttggtgcatcatcttcttcgataggaaggacatacggcacacggtattttcattcacggagagtaaagaagggaggtattgaccaaccatggagagcgagcaaggacccaaaagagaaatgggtcacaatcatcccaattattggcatacttgtaggacttggaattgcggggttcttgatttatgatggtatacgttccgtcacccatcataaatactgtccagtcatgagtgatgatttctcatctggtacacttaataccgatatttggactcaggaagcagaagttggtggctttggtaatggagagtttgaacaaactacacttgacgacgaaaatgtattcatcaaagatggaaagctcatcattaggccaaccttacaagatgcaaaactcatcgagtcgaataatgtcatcaatcttacatctgccgggacatgttcgtccgatgtactttcaaactgtgtttctatcaccaatactaccaccggcacaattattcaacctgtcaaatcaggaagaatcaataccaagaaaggcgcaaccattaaatatggacgtgttgaggtaactgcaaaattacctgctggagattggttatggcctgccatttggatgttaccagtaaccgatacttacggcgcatggccagcatctggagagattgatattgtggaatctcgaggaaataatcacacatatggacaaggaggaaacaacatcatctcgtctaccttgcattggggacctgattctgacaatgatgctttctggagaacaaatgttaagcgtgctgctctccacaccacttactctgccggattccataagtatggtcttgagtggtcccaaaaatacctttacacctacatcgactccaaacttcttcaagtactctacaataccttcaatgaaccactctggcaacgtggtgatttcccagattccagcagcaacggaactagaattgtagatgtttggtctcaaactggtcgtgtcaacacaccttttgatcaagaattctacctcatccttaatgtcgcagttggtggtaccaatggatggtttgccgatggaaagagtggaaaaccttggattgatgcttctgctactgccaaaaatgatttctggaatgcgagagattcttggtatccaacatggacagcgaatgataatcaaggtcagatggaagttagcaaagtagaaatctggcaacaatgtgatggaaatgaggaactttaa

SEQ ID NO: 187 - protein, 623 aa, Sordaria macrospora
MYGQDDNRNITVPSPTYQNPFRTPVQSETDGQEFTSDLSLEEKGFEVSSPSLPCVSVDNDIGPYNNEVLSQSLSFAQEFSRYPPLTNETPKEEYHGHTSSLNKVAILKQIYDTVTGVFRLKETEEKGKADESIDIFSTSEFSSDHIRHVDELDDYLGWGRFCDIMFLIFLMLGITLLFIVFPVLTFSGNDPFDPSNRVTNSKPLTDHLFGNLRYLRTSLIDKDTPVNAYEKIGANGKKYKLVFSDEFNDEGRSFYPGDDQYWEAVNLHYAATNDLEWYDPDAATTENGTLGYTMGGTLKSQLKLSFRYASGGIFEVSASLAGTGKSAGFWPGLWTLGNLGRPGYLATTEGVWPYSYNECDSGITPNQSTPDGLSYLPGQKLSSCACPGEDHPSLGKGRGAPEIDALEGSNTKLHDDDPDEIGVACQSGQFAPFDLYYYPDYRFIAIHNESVTCMNTYTGGPFQEALSGVTVLNPEWYDRKGFQTYGFDYMPGTSDGYISWFIGKNKTWTMTGQAVKSNGNIGPRIISEEPMSIILNLAISKNWAYYYFHRLQFPAKLYIDYVRIYQDPEHTNMHVTCDPPGYPTTKYIAAHPKAYLNPNATSWEGAGYRWPKNSLMHDCGTSS

SEQ ID NO: 188 - DNA, 1872 bp, Sordaria macrospora
atgtatggccaagacgataatcgaaacatcacagttccctctccgacttaccagaatccattcagaactccggttcagtcagagacggatgggcaagagttcacttcagacttatctttagaagagaagggctttgaagtttcaagtccctctttgccgtgtgtgtctgttgacaatgacatcggtccctacaacaatgaagttttgtcccaatccttgtcatttgcacaagaatttagtcgatatccacctttaactaatgaaacgccgaaggaagaatatcatggtcatactagttctctcaacaaagtagccatattaaaacagatttacgatacagtcacaggagtattccggctgaaggaaactgaagaaaaaggaaaggcagatgagtcaattgatattttctcaacgagcgaattctctagtgatcacatacgacatgtggacgaacttgatgattatttaggatggggtcgcttttgtgatattatgtttttaatctttcttatgctgggcataacacttctctttatcgtgtttcctgtacttaccttttctggcaatgacccctttgatccaagcaatcgtgtcaccaattcaaaaccgctaacagatcacttgtttggaaacttacgctatcttcgtaccagtctcattgacaaggatactccggtcaacgcatatgagaaaattggcgccaatggaaagaagtacaagcttgtgttctctgacgaatttaatgacgaaggccgttctttctacccgggtgatgaccagtattgggaagcagtgaatctgcattacgctgccacgaacgatctcgaatggtatgatcccgatgctgcgacaaccgaaaacggaacactgggatatacgatgggaggcactctcaaatcacaacttaaactttcgttccgctatgcttcaggtggcatctttgaggtgtctgcttcacttgccggtacaggaaagtctgctggattctggcccggcttatggactcttggaaaccttggacggcctggttaccttgcaacaactgagggtgtgtggccgtattcttataatgaatgcgattcaggaatcacgcccaatcaatctacaccggacggtctatcatatcttcccggtcaaaaactttccagctgtgcttgtcccggagaggatcatcctagtttgggaaaaggtcggggggcgcccgaaatcgatgctttggaaggttcaaatacgaaacttcatgacgacgaccctgatgaaattggtgttgcttgtcagtctgggcagtttgcaccattcgatttgtattattatcctgactacaggttcatcgcgatacacaacgagagtgttacgtgcatgaatacttacacaggcggaccatttcaagaagcgttgtcgggtgttactgtactgaatccggagtggtatgaccggaaaggatttcaaacctacggttttgactatatgcccggaacgagtgatggttacatttcatggtttattggaaagaacaaaacatggactatgacggggcaagccgtaaagtccaacggtaatattgggccgcgaataattagtgaggagcctatgtcaattattctaaacttggctatatctaagaattgggcatattattattttcacaggctccagtttcctgccaagttgtacattgattacgtacgaatatatcaggatcccgaacacacgaatatgcatgttacttgcgatcctccaggctatccaacaaccaaatatattgcagcacacccaaaagcgtatctcaatccaaacgctacgtcttgggagggagctggatacagatggcccaagaattcgctgatgcatgattgcggtacctcgagttaa

SEQ ID NO: 189 - protein, 623 aa, Schizosaccharomyces japonicus; identical to SEQ ID NO: 187

SEQ ID NO: 190 - DNA, 1872 bp, Schizosaccharomyces japonicus; identical to SEQ ID NO: 188

SEQ ID NO: 191 - protein, 712 aa, Zygosaccharomyces rouxii
MSGLRNLTNTSQQNLNGSGNDSEFSSGEREQILRGGENPFLGSDEEEEVVNNSETSLIHNLPQFDKGPGNGPQRDLSDYRGYYSKNGSGDQLGERTQNLNPPKILPHSNSVSSNLSTNDILSPPEYDRYPLVGSRIASVQQLHGYNNAPQHGSSNANNQLGMSLPPGNGSSSSLSSNPFLVDHDFSPFGGYPESSFPLTLDDKEDDDYLHNPDPEEEARLDRRRFVEDFRHMSKKSFGGLAGFVLLILGGAAIFVILPALTFTGATKGSYHQVVTFLTDYKYPQLSAIRTNLVDKDTPDQFKTKKAMDGSLWKLVFSDEFNAEGRTFYDGEDQFWTAVDLNYDATHDLEWYDPDAAITREGALRIRMDAYKNHDLYYRSAMLQSWNKMCFTQGRIEASANLPNYGRVTGLWPGMWTMGNLGRPGYLASTEGVWPYSYESCDAGITPNQSSPDGISYLPGQKLNACTCDDEDHPNQGVGRGAPEIDMIEGETDTSLNTGIASQSLQVAPFDIWYIPDYDFVEIYNFSVTSMNTYCGGPFQQAVSATTTLHPDWYEFGPTAGKFQTYGFELLNDDENGYIRWYVGDDPTMTLHAKALHPSGNIGWRRMSKEPMAVVLNLGISNNWAYINWQMILFPVTMSIDFVRVYQPNDSVSITCDPVDRPTYDYIEQHKNAYYNVNLTSWEAAGYTFPKNILTGNCKSSKFQLNKNKDKKN

SEQ ID NO: 192 - DNA, 2139 bp, Zygosaccharomyces rouxii
atgagcgggttgagaaatctcaccaatactagccaacagaatttaaatggtagtggtaacgattctgaattttcctccggggaaagagaacagattcttcgaggcggtgaaaatccgttcctaggtagtgacgaggaagaagaagtggttaataacagtgaaacctcgttgatccacaatctacctcaatttgataaaggccctggtaatggtccccagagagatctttctgattaccgaggttactattcaaaaaatggatctggtgatcaacttggagagagaactcaaaatttgaatcctccaaagatactgccacactctaattcagtttcatcgaatctttctacaaatgatatcttatcaccacctgaatacgacagatatccattagtgggctcacgtatagcgtctgttcaacagttacatggttacaataatgcaccacaacacggcagcagtaatgctaataatcaactaggaatgagtctaccgccgggtaacggatcatcatcttcgttatcatcaaatccattcttggtggatcacgatttttcaccatttggcggttatccagaatcatcattcccattgactttggatgacaaggaggacgatgattatttacataatcctgatcctgaggaggaagcacgtctagatcgtaggagatttgttgaagattttagacacatgtctaaaaagtcattcggtggattggccggatttgtacttttaatattaggtggtgctgccatttttgtcattttaccagctttgacctttacgggtgccactaagggtagttatcaccaagtggttactttcctgacagattacaaatatccacaattatctgcaattagaaccaatttggtcgataaggatacacctgatcagtttaagaccaaaaaagcaatggatggatctctctggaagctggtcttttcagatgagtttaacgccgaaggtaggactttttacgatggtgaagatcagttttggaccgcggttgacttaaactacgatgctacccacgatttagaatggtatgatcctgatgctgctataactagggagggtgctctgagaatcagaatggacgcatataagaaccacgatctttactacagatctgccatgctccaatcttggaataagatgtgtttcactcaaggtagaatagaagcttctgccaatctacccaactacggtcgtgtgaccgggttgtggccaggtatgtggacaatgggtaatttgggtagaccaggctatctggcttccactgaaggtgtttggccgtactcttatgaatcatgtgatgctggtattacgccaaaccaatcctctccagatggtatctcttatttgccaggacaaaagttaaatgcatgtacttgtgatgacgaggaccatccaaatcaaggtgtcggtagaggtgcacctgaaatcgatatgattgaaggtgagacggatactagtcttaatacaggtattgcctctcaatcgttacaagtggctccctttgacatttggtatattcctgactacgactttgtggagatttacaatttttctgttacttcaatgaatacctattgtggtggtccattccaacaagctgtctcggcaaccaccacgctacatccagattggtacgaatttggtcctacagctggtaaattccaaacttatgggtttgagcttttgaacgatgacgaaaatggttatatccgttggtatgtcggtgatgacccaactatgacacttcacgccaaggccctacatcctagtggtaacattgggtggagaagaatgtccaaggaacccatggcagttgtgttaaacttgggtatttccaacaattgggcttatatcaactggcaaatgattcttttcccagtgacaatgtctattgacttcgttagagtctatcaacctaacgattcagtctcgattacgtgcgaccctgttgaccgccctacttacgattacatcgaacaacacaagaatgcctactacaacgttaatctaacctcatgggaagccgctggatacactttccccaagaacattctaactggtaattgtaaaagctccaaattccagttaaataaaaataaggataaaaagaactaa

SEQ ID NO: 193 - protein, 696 aa, Zygosaccharomyces rouxii
MRDLTGNLANTGVVSRQNLLDDDISSNSSSIEIQHETAESGVNPFMGSDEEVGADDVQKKIVSTASSMPDYKGYYSKKNGASGGWQGSGGIAKSPQKLGPGNITTKKLSTSSVNTLSPNDIWKPPEYDRYPQVSSRVLSMPPTAQQQKEQQNSPVGSASSLSSNPNPFSGEPDFSPFGGYPASSFPLMMEEKEEDDYLHNPDPEEEARLDRRRFVEDFRHMSKRSFGGLAGLILLLLGAAAVFVVLPALTFTGATKGDYHNVVDFITPYKYPQLSAIRTDLVDKDTPEQFKTKKAMDGSLWKLAFSDEFNAEGRTFYDGEDQFWTAVDLNYGGTNDLEWYDPDAAITKEGALRIRMDAYKNHDLYYRSAMVQSWNKMCFTQGRIEASANLPNYGSIQGLWPGMWTMGNLGRPGYLASTEGVWPYSYESCDAGITPNQSSPDGISYLPGQRLSACTCDDEEHPNQGVGRGAPEIDMIEGEVDTKLKTGVASQSLQVAPFDIWYIPDYDFVEIYNFSISAMNTYCGGPFQQAVSATTTLHPDWYEFGPTAGKFQTYGFELLNDDENGYIRWFVGDNPTMTLHAKALHPSGNIGWRRMSKEPMTIVLNLGISNNWAYIDWQMLFFPVTMSIDFVRIYQPNSSISITCDPPDHPTYDYIEQHKKAYYDNNATSWEDAGYSTPKNILTGNCKSSKYKKSNN

SEQ ID NO: 194 - DNA, 2091 bp, Zygosaccharomyces rouxii
atgagagaccttacaggaaaccttgccaataccggtgttgttagtcgacaaaatctactggatgatgacatatcgtcgaattcatcctctattgaaatacaacatgaaacggcagaatctggtgtaaatccattcatgggtagtgacgaagaagttggagctgatgatgtccagaaaaagattgtgagtacagcgtcttcaatgccagattacaaaggttactattcaaagaagaatggtgctagtggtggctggcaaggtagtggtggtatagctaaatcaccgcagaaattaggaccaggcaatattactacgaaaaaactgtcgacgagctctgttaacactttgtccccaaatgacatttggaaaccgcctgaatacgatagatatcctcaagttagttcaagagtactttcaatgcccccgacagcacaacaacaaaaagaacaacaaaactcacctgtgggttcagcttcatcactttcttcaaacccaaatccgttttcaggtgaacctgatttttcaccatttggtggttatccagcatcctctttccccctaatgatggaggaaaaggaagaagatgattatttacataatcctgatcctgaggaggaagcacgtttagatcgtaggagatttgttgaagattttagacacatgtctaaaagatcgttcggtggattggctggtctaatcctattactattaggtgccgctgctgtgtttgttgttttaccagctttgacctttacaggagccactaagggtgactaccataacgttgttgactttataaccccctacaagtatccacagttatctgcaattagaactgatttggtcgataaagatacacccgagcagttcaagaccaaaaaagcaatggatggatctctctggaaattggccttttcggatgaatttaatgctgaaggtagaactttttacgatggcgaagatcagttttggaccgcggttgacttaaactatggcggtactaacgatttagaatggtatgaccctgatgctgctataactaaggaaggtgctctgagaatcagaatggacgcatataagaaccatgatctgtactacagatctgctatggtccagtcctggaataagatgtgttttactcagggtagaatagaagcttctgccaatttacccaattacggtagcattcaaggtttatggccgggtatgtggacaatgggtaatttgggtagaccaggctatttggcttccactgaaggtgtttggccgtactcttatgaatcatgtgatgctggtattacgccaaaccaatcttccccagacggtatttcttatctacctggacagaggttaagcgcttgtacttgcgatgatgaagagcatccgaatcaaggtgttggtagaggtgcgcctgaaattgatatgattgaaggcgaagttgacaccaagttgaagactggtgttgcatctcaatcgttgcaggttgcgcccttcgacatttggtatattcctgattacgattttgtggaaatttacaatttttctatttctgcgatgaacacctattgtggtggtccattccaacaagctgtctcggcaaccaccacgctacatccagattggtacgaatttggtcctacagctggtaaattccaaacttatgggtttgaacttttgaacgatgacgaaaatggttatatccgttggtttgttggtgataacccaacaatgacacttcacgccaaggccctacatcctagtggtaacattgggtggagaagaatgtccaaggagcctatgacgatcgtgctgaacttgggtatttccaacaattgggcttatatcgactggcaaatgcttttctttccggtaacaatgtctattgacttcgttagaatctatcaacctaacagttcaatctcgattacgtgcgaccctcctgaccaccctacttacgactacattgaacagcacaaaaaggcctattacgataataatgcaacttcctgggaagatgccggttacagtactccaaagaatattttaacaggtaattgtaagagttccaaatataaaaagagtaataattaa

SEQ ID NO: 195 - protein, 673 aa, Talaromyces marneffei
MAEDIKHKLTTRSTRSTPHIRLNSGRHEPFVDMEDDGRERLKHTLSARSTRRSPVPSVIRHSAGPSTITALTPGGDGLMSPPLISPTESSELLFPPPRKVRRSRESPERSKSPSMISYSCTSWDDSHSDLSQDSRGYAFYPFADSRAPSHASSDDENVNTQTVSEKYNIMPTEGLLLFPEDVEKDDYLHNPDPADRERDCDICNNRGLANVGGLALLVTGIVALFIIYPVTTFVDGVVQSSRDPCTLDPMCISMTRPLLKNVRTGLIDPMTPSSAMTKKAADGTEWQLVFSDEFNTPGRTFYEGDDPFFQGVDLWYGVTEDLEWYDPDAITTSNGVLEIHFDSYDNHNLSFRSGMLQSWNQMCFSGGRLEASISLPGRGDTSGFWPGFWAMGNLGRAGYAATTDGMWPYSYDDICDVGITANQSSTDGLSFLPGMRLPACTCPGVDHPSPGKSRGAPEIDVIEASVTVLDEMQDRIGVVSQSLQLAPYDTWYLPDYDFTAVYNPSITEINTYRGGPFQQVASGLTNLNNNWYDGKEYQIYAFEYAPGANGNVTWFVGSEKTWTIDAKAVRPNGNIGQRVIPVEPMYPILNFGMSPSFAMLNWTGLAETWPATMRVDYIRIYQDPNEISITCDPVGYGTTEYIKQHPEAYHNPNLTLWSQTGYDWPKNSFVDGC

SEQ ID NO: 196 - DNA, 2022 bp, Talaromyces marneffei
atggcggaggacatcaagcacaaactcacaaccaggagtactcggagtactcctcacatccggctcaactcaggccgccatgaaccgttcgttgacatggaagatgacggcagagaacgactgaaacatacactatcagcacgatctactcgccgctctccagttccatcagttatcagacactcggcagggccatcaacaatcacggcacttacccccggaggcgatggattgatgtcacctccattgatatcccccactgaatcttcagaactcctcttcccaccaccccgaaaagtgcgtcgctctcgggaaagtccagagcgctccaagtcaccgtctatgatctcctacagctgcaccagctgggacgactcgcactcagacctgagccaagacagtcgcggatacgcgttttatccttttgcagactcaagagcgccgtctcatgcgagtagtgatgatgagaatgtgaatacgcagacggtctcggagaagtataatattatgccgacggaggggttgttgctgttcccggaggatgttgagaaggatgattatttgcataatcctgatccggcggacagggagcgagactgtgatatatgtaataacaggggattggctaatgtgggtgggttggcgttgttagtgacggggattgtggccctgtttattatttatcctgtcacgacattcgtggatggtgtcgtccaaagctctcgagacccatgcacactggacccgatgtgcatttcaatgacaaggccgctcttgaagaatgtcaggaccggtcttattgatcctatgacgccaagctcagccatgacgaaaaaggcggctgatggaactgaatggcagcttgtcttttccgacgagttcaatacgcctggcagaaccttttatgaaggcgatgatccgttctttcagggagtggatctttggtacggagtgactgaggatctagagtggtacgatccagacgcaataacaacatcaaacggtgttctagaaatccacttcgacagttacgacaaccacaacctcagctttcggtctggcatgctccaatcctggaaccaaatgtgtttctcaggcggacgacttgaagccagtatctcccttcccggacgaggcgacacatctggtttctggcccggtttctgggcaatgggtaacttgggacgagctggatacgcagcaactacagatgggatgtggccatacagctatgatgatatctgcgatgtgggaatcacggcaaaccagagttcgacggatggcttgagttttttgcctggcatgcgtttaccggcttgtacgtgtccgggtgtggatcatccatcgcctgggaagtcgaggggtgcaccagaaattgatgttattgaggctagtgttacagtgctcgatgagatgcaggatcggattggcgtggtctctcagagtttgcagttggcgccgtatgatacgtggtatttgccagattatgatttcactgccgtctacaacccatccatcaccgagatcaacacctaccgtggcggccccttccaacaggtcgcctccggcctcaccaacctcaacaacaactggtacgacggcaaagaataccaaatctacgcctttgaatatgctcccggcgccaatgggaacgtaacctggttcgtcggcagcgaaaagacctggactatcgacgctaaagccgttcgccctaatggtaacattggccagagagtaatccccgtggagccaatgtacccaatcctgaattttggtatgtcgccttcatttgcgatgctcaattggacggggctggccgagacgtggcctgctacgatgagagtagattatattcggatttatcaggatccgaatgaaattagtattacgtgtgatccggtggggtatgggacaacggagtatattaagcaacatcctgaggcgtaccataatcctaatttgactttgtggtcgcaaactgggtacgactggcccaaaaattcattcgttgatggatgttaa

SEQ ID NO: 197 - protein, 673 aa, Talaromyces stipitatus
MGEDNIKHKLTTLSTRSTPHIRLNSGRHEPFVDMEEDGRERLKHTLSTRSSRPSPVPSVIRHSAAPTTTALTPSGDGLISPPLISPTESSELLFPLPRKVRRSRGSPDRSKSPSVISYQRSNSWDSHSDLSRDSRGDPLDPFADSRAPSHASSEEGYVNTQTVSEKYNIMPTEGLLLFPEDVEKDDYLHNPDPADRDRDCDICNTRGLVNVGGLALLVVGIVALFIIYPVTSFVDGIVQGSRDPCTLDPMCISITRPLLKNIRTGLIDPTTPKSAMTKMSADGTEWQLVFSDEFNTPGRTFYEGDDPFFQGVDLWYGVTEDLEWYDPDAISTSDGVLEIHFDSYENHNLSFRSGMLQSWNQMCFSGGRLEASISLPGRGDTSGFWPGFWAMGNLGRAGYAATTDGMWPYSYDDICDSGITANQSATDGLSFLPGMRLPACTCPGTDHPTPGRSRGAPEIDVIEASVTVLDEMQDRIGVVSQSLQLAPYDLWYLPDYDFTAVYNPSITSINEYRGGPFQQVASGLTNLNNNWYDGKEYQIYAFEYAPGARGNVTWFVGSEKTWTIDARAIRPNGNVGQRVIPMEPMYPILNFGMSGSFAMLNWTGLAETYPATMRVDYIRIYQNPNEISITCDPAGYTTTEYIKQHPKAYHNSNLTLWSQTGYEWPKNSFVDGC

SEQ ID NO: 198 - DNA, 2022 bp, Talaromyces stipitatus
atgggggaggataatattaaacacaaactcacaactctgagtacccgaagtactcctcatattcgactcaactcaggtcgccatgaacccttcgttgacatggaagaagatgggagggaacggctgaaacatacgttatcaacaagatcttctcgtccatcacctgtcccatcagtgattagacattcagcggcaccaacaacaacagcactaacccccagcggagatgggttgatttcgcctccattgatatcgcccactgaatcttcagaactcctctttccactaccaaggaaagtgcgtcgctcaagagggagtccagaccggtccaaatctccatctgtgatctcataccaacgcagcaacagttgggattcacactcggacctgagtcgtgacagccgcggggaccccctcgacccatttgcagattccagagcgccgtctcatgccagtagtgaggagggatatgtaaatacgcaaacggtctcggaaaaatataatatcatgccgacggagggattacttctgtttcccgaggacgttgagaaggatgattatttgcataaccctgatccggcagatagggaccgggattgtgatatatgtaatacgagggggttggttaatgtgggtggactcgcgttgttggtggttggaattgtggcactgtttattatttatcctgttacgtcatttgtcgatggcattgtccaaggctcacgagatccatgcacattagacccaatgtgtatttcaataacccggccactcttgaagaatatcaggaccggtctgatcgaccctaccacaccaaagtcagctatgacgaagatgtcggctgacggaaccgagtggcagcttgttttttcggacgaattcaatacaccagggagaacattttatgaaggcgatgatccattctttcagggagtggatttgtggtacggggtgactgaggatttagagtggtacgaccctgatgcaatctcaacctcagatggcgttctagagattcacttcgacagctacgaaaatcacaacctcagcttcagatccggcatgctccaatcctggaaccaaatgtgcttctcaggaggacgactagaagctagtatttccctccctggtcgaggcgacacatctggcttctggcccggtttctgggctatgggcaacctaggacgagctggatatgcagcaaccacggatggaatgtggccgtatagttatgatgacatttgcgactcgggaattactgccaaccaaagcgcaacggatggactgagttttttgcccggtatgcgtttaccggcttgtacttgtccaggaacagatcatcctacgcctgggaggtcgaggggcgctccggaaattgatgttatcgaggctagtgtgactgtcctcgatgagatgcaggatcggattggtgtggtatctcaaagtttgcagctggcaccgtatgatttgtggtatctgccagattatgatttcaccgccgtctacaatccgtccatcacatccatcaacgaataccgcggcggccccttccaacaggtagcctccggcctcaccaacctcaataacaactggtacgacggcaaagaataccaaatatacgcgtttgagtacgccccgggcgcccgaggtaatgtgacctggttcgttggcagcgaaaaaacatggacgatagacgcacgagccatacgcccgaacggaaacgttggccaaagagtgatcccaatggaacctatgtatccaatcctcaactttggtatgtctggctcatttgcgatgctcaattggacggggctcgcggagacatacccagctacaatgagagtcgattatattcggatctatcagaatccgaacgaaatcagtattacgtgtgatccggcggggtatacgacgacggagtatattaagcagcatcccaaggcgtatcataattctaatttgactttgtggtcccagactgggtacgaatggcccaagaactcgtttgttgatggatgttga

SEQ ID NO: 199 - protein, 483 aa, Thielavia terrestris
MDHTEHFYGRSAAGMPSVASTAAPTPQRPGTPSESVGRNPFGDGVESQASHRSSGNPANPFASPDASRPASSLDSASALGRYDGGQRYFHSRRVRKGEIEKPWTKQADPKEKWVTILPLLGIFIGLAISGVLVWDGIRSVVKHKYCLVLEEDWSNGFNEKIWQKEVQVGGFGNGEFEQTTGGDQNVYIENGNLIIKATPQDDALMQQDYTINLLKDGTCTSKLPADCIAVTNITTGNSSIVPPVLSGRINTRPGATIKYGRVEVTAKLPAGDWLWPAIWMMPRDSVYGPWPQSGEIDLMESRGNNYTYPQGGNNIMSSALHWGPNPANDGWWRTNVKRQALHTTYSAGFNTFGLEWSQKYLFTYVNSRLLQVLYVNFDTPMWSRGNFPTQDANGTRIVDIWSSTGRDQTPFDQPFYLILNLAVGGTNGWFEDNVNGKPWLDASPNAKKDFWQAKDKWFPTWTQPQMEVSKVMMWQQCDGDEDL

SEQ ID NO: 200 - DNA, 1452 bp, Thielavia terrestris
atggatcacaccgagcacttctacggccgctcggccgccggcatgccgtcggtcgcctccaccgccgccccgaccccgcagcggcccggcacgccgagcgagtcggtcggccgtaaccccttcggcgacggcgtcgagtcgcaggcgtcgcaccgctcgtccgggaacccggccaacccgttcgccagccccgacgcttcgcggcccgctagcagcctcgactcggcctcggcgctgggccgctacgacggagggcagcgctacttccactcgcgccgcgtgcgcaagggcgagatcgaaaagccgtggaccaagcaggccgaccccaaggagaagtgggtcaccatcctgcccttgctgggcatcttcatcggcctcgccatctcgggcgtgctggtctgggacggcatccgcagcgtcgtcaagcacaagtactgcctcgtgctggaggaggactggtccaatggcttcaacgaaaagatctggcagaaggaggtgcaggtaggcgggtttggcaacggcgagttcgagcagaccaccggcggtgaccagaacgtctacatcgagaacggcaacctcatcatcaaggcgacgccgcaggacgacgccctgatgcagcaggactacacgatcaacctgctcaaggacggcacgtgcacgtcaaagctgccggccgactgcatcgctgtgaccaacatcacgacgggcaactcgtccatcgtgccgccggtgctgtcgggccgcatcaacactcggcccggggcgacgatcaagtacgggcgggtcgaggtgacggccaagctgccggccggcgactggctgtggccggccatctggatgatgccgcgcgactcggtctacgggccgtggccgcagtcgggcgagatcgacctgatggagagccgaggcaacaactacacgtacccgcagggcggcaacaacatcatgtcgtcggcgctgcactgggggcccaacccggccaacgacggctggtggcgcaccaacgtcaagcggcaggcgctgcacacgacctactcggccggcttcaacacgttcgggctcgagtggtcgcagaagtacctcttcacctacgtcaactcgcgcctgctgcaggtgctctacgtcaacttcgacacgcccatgtggtcgcgcggcaacttcccgacgcaggacgccaacggcacgcgcatcgtcgacatctggagcagcaccggccgcgaccagacccccttcgaccagcccttctacctgatcctcaacctcgccgtcggcggcaccaacggctggttcgaggacaacgtcaacggcaagccctggctcgacgcctcgcccaacgccaagaaggacttctggcaggccaaggacaagtggttccccacctggacccagccccagatggaggtcagcaaggtcatgatgtggcagcagtgcgacggcgacgaggatctgtag

SEQ ID NO: 201 - protein, 483 aa, Trichoderma virens
MEQNFDGRPPVVPSAATSSAPTPLRPGTPNTDDNRNIFEGGTDTASNAPGTGTNPFVSPDASRPASSFESSSGSPYDERPEERGGQRYFHSRLVKKGEIEKPWLEKVDPKEKWVTILPLLGILLGLCISGFLVWDGMRSVVKHKYCPVLDEDFSNGIDPSIWTKEVQIGGFGNGEFEQTTGGDGNVYVENGHLMIKATLQDANLVQKNNVINLLKDGTCTSKDYYSCVAATNTTNGNSSIVPPTLSGRINTLKGATIKYGRVEVTAKLPVGDWLWPAIWMLPVKDTYGPWPSSGEIDIMESRGNNHTYAQGGNNIASSALHWGPDPANDAWWKTNNKRKALHTTYSAGFNTFGLEWSQKYLFTYINSRLLQVTYTNFNKPMWARGGFPDSTSNGTRLIDIWSQTGRDNTPFDQEFYLILNLAVGGTNGWFEDGQSGKPWLDHSPNAKKDFWDARNTWYPTWTQPQLEISRVVMTQQCDGNEDL

SEQ ID NO: 202 - DNA, 1452 bp, Trichoderma virens
atggagcaaaactttgacgggcgacctcccgtcgtcccctcggccgcaacctccagtgcgcccacgcctctccgtcctggaactcccaacacagatgacaaccgcaacatcttcgagggggggaccgacacggcctcaaacgctcccggaactggcacaaacccctttgtgagcccggacgcctcacggcccgcctccagctttgagtcgtccagcggcagcccctacgatgagcgtcccgaagagcgtggtggccagcgatatttccactcgcggctggtcaagaagggagaaatcgaaaagccctggctggaaaaggtcgatcccaaggagaaatgggtcaccatattgcccctcctcggcatcctccttggcttgtgtatttccggcttcttggtctgggacggcatgcgtagtgtcgtcaagcacaagtactgccctgtcttggatgaagatttcagcaacggcattgatccgagcatttggaccaaggaggtgcagattggcggatttggcaacggcgagttcgaacagactactggtggcgacggaaacgtctatgttgagaacggccatcttatgatcaaggcaactctccaagatgccaacctggtccagaagaacaatgtcatcaacttgctcaaggacggcacttgtacctccaaggactactatagctgcgtcgccgccaccaacaccaccaacggcaactccagtatcgttcctccgacactgtccggccgtatcaacacgctgaagggagcaactatcaagtatggccgtgttgaagtcactgcaaagctgcctgtaggcgactggctgtggcccgccatttggatgttgccagtcaaagatacctatggcccctggccctcgtccggagagattgatatcatggagtcgcgtggaaacaatcacacctatgctcaaggcggcaacaacattgcttcatctgctctacactggggccctgaccccgccaatgatgcttggtggaagaccaacaacaagcgcaaggctctgcacaccacttacagcgcgggattcaatacctttggccttgagtggtcgcaaaagtatctcttcacctacatcaacagccggctgctgcaagtcacctacaccaactttaacaagcccatgtgggcacgaggcggcttccccgactccacctctaatggtaccaggctgattgacatctggagccagaccggccgtgacaacaccccatttgaccaggagttctacctcatcctgaaccttgctgttggcggtaccaacggttggtttgaagacggtcagtctggcaagccttggctggaccactctcccaatgccaagaaggacttttgggatgcccgcaacacatggtatcccacgtggacgcagcctcagctcgagattagccgcgttgtcatgacgcagcaatgcgatggtaacgaggatttgtga

SEQ ID NO: 203 - protein, 483 aa, Trichoderma reesei
MEQHDYGRPPVVPSAATSSAPTPLRPGTPNTDASRNLYDNTDSGSNVPGTGTNPFVSPDASRPASSFESSSGSPYEEPAEAPGGQRYFHSRLVKKGEIEKPWLNKVDPKEKWVTILPLLGILLGLCISGFLVWDGMRSVVKHKYCPVLDEDFSSGLDPSIWTKEVQVGGFGNGEFEQTTSGDGNVFIGDNGHLMIKATLQDANLVEKNNVINLLKDGTCTSKDYYSCVAATNTTAGNSTIVPPTLSGRINTKKGATIKYGRVEVTAKLPVGDWLWPAIWMLPVKDTYGPWPSSGEIDIMESRGNNHTYAQGGNNIASSALHWGPDPANDAWWKTNNKRKSLHTTYSAGFNTFGLEWSQKYLFTYVNSRLLQVTYTNFNKPMWKRGGFPDSTSNGTRLVDIWSQTGRDNTPFDQEFYLILNLAVGGTNGWFEDGRSGKPWLDHSPNAKKDFWEARDTWYPTWTQPQLEVSRVLITQQCDGNEEL

SEQ ID NO: 204 - DNA, 1452 bp, Trichoderma reesei
atggagcaacacgactacgggcgacctcccgtcgtcccctcggccgcaacctccagcgcgccaacgcctctccggcctgggactcccaacacggatgccagccgcaatctctatgacaacaccgactcgggctcaaacgtcccgggaaccggcacaaaccccttcgtgagcccggacgcttcacggccagcttccagcttcgagtcctccagcggaagcccttacgaagagcccgccgaagcccctggcggccagcgctatttccactcgcggctcgtcaagaagggcgagattgaaaagccctggttgaacaaggtcgatcccaaggagaaatgggtcacgatcctgcctctcctcggcattctcctgggcctctgcatttccggcttcttagtctgggacggcatgcggagtgtcgtcaagcacaagtactgtccagtcctggatgaagactttagcagcggtcttgatcccagcatctggaccaaagaggtccaggtgggcggctttggcaacggcgagtttgaacagacgactagcggcgatggaaacgtcttcatcggcgacaatggccatcttatgatcaaggcgacgctacaagatgccaacctggttgagaagaacaacgtcatcaacctgctcaaggacggcacttgcacctccaaagactactatagctgcgttgctgccaccaacaccaccgccggcaactctaccattgttcccccgaccctctctggccgcatcaacaccaagaagggcgcaacgatcaagtatggccgcgtcgaagtcactgcgaagctgcccgtgggtgactggctgtggcccgccatctggatgctgcccgtcaaggacacctacggcccctggccttcgtctggcgagattgacatcatggagtcgcgcggcaacaaccacacatatgcgcagggcggcaacaacattgcttcgtcggccctgcactggggccctgatccggccaatgatgcttggtggaagacgaacaacaagcgaaagtcgctgcacaccacttacagcgcgggcttcaacacgttcggcctcgagtggtcgcaaaagtacctcttcacctacgtcaacagccggctgctgcaagtcacctataccaacttcaacaagcccatgtggaagcgcggcggctttcccgactccacgtccaatggcacgcggttggtggacatctggagccagacgggccgcgacaacacgccctttgaccaggaattctatctcattctgaatcttgctgtcggcggcacaaacggctggtttgaggacggcaggtccggcaagccttggttggaccactcccccaatgccaagaaggacttttgggaggctcgtgacacatggtaccctacttggacccagcctcagctcgaggtcagccgcgttctcattacccaacagtgtgatggtaacgaggagttgtaa

SEQ ID NO: 205 - protein, 477 aa, Trichoderma atroviride
MEQNFYGRPPVPSAATSSAPTPLRPGTPNTEDGNRNMFDSTDSASNAPGPGTNPFVSPDGSRPASSFNSSNEGPFEGTGQRYFHSRLVKKGEIEKPWLEKHDPKEKWVTILPLLGILLGLCISGFLIWDGMRSVVHHKYCPVLDDDFSNGLDPSIWTKEVQVGGFGNGEFEQTTGGDSNVFVQDGNLMIQATLQSADLVEKNNVIDLLKDGTCTSKDYYSCVAATNTTNGNSSIVPPTLSGRINTFKGAKIKYGRIEVTAKMPVGDWLWPAIWMLPVNDTYGPWPASGEIDIVESRGNNHTYSQGGNNIASSALHWGPDPANDAWWKTNNKRQALHTTYSSGFNTFGLEWSEKYLFTYINSRLLQVTYTNFNKPMWSRGGFPDSTSNGTRLVDIWGKTGLDNTPFDQEFYLIMNLAVGGTNGWFEDGQSGKPWLDQSPNAKKDFWNARDSWYPTWTQPQLEVSRVVILQQCDGNEDL

SEQ ID NO: 206 - DNA, 1434 bp, Trichoderma atroviride
atggagcaaaacttctacgggcgacctcccgtcccctcggctgccacttccagtgcgccaacgcctcttcgcccgggaactcccaatacagaagatggcaaccgcaacatgtttgatagcactgattctgcctccaacgctcccggccctggcacaaatccttttgttagccctgacggctcaagaccggcttctagttttaattcctctaatgagggtcctttcgagggaactggccagcgatactttcattcacgactggtcaagaagggcgagattgagaagccttggctggaaaagcatgatcccaaggagaaatgggtcacaatcctgcctctccttggtatcctccttggcctctgtatctcaggtttcctgatctgggacggtatgcgcagtgttgtccaccacaaatactgtcccgtcctggatgacgactttagcaacgggcttgaccctagcatttggacaaaagaggtgcaggttggcgggtttggcaatggcgagtttgaacagaccactggaggcgatagcaacgttttcgtccaagatggcaacctcatgatccaggcaaccctccaaagtgctgatctcgttgagaagaacaacgtcatcgatctcctcaaagacggcacctgtacctccaaggactattacagctgcgtcgcggccaccaacaccaccaacggcaactctagcattgtccctcccaccctctctggccgcatcaacacattcaagggagcaaagatcaagtatggccgtattgaagtcactgcaaagatgcctgtgggcgactggctgtggcctgccatctggatgctgccggtcaatgacacctacggtccctggcccgcctctggagaaattgatatcgtggagtcgcgtggtaacaaccacacctattcccaaggcggcaacaacatcgcttcgtctgctcttcactgggggcccgacccggctaatgacgcttggtggaagaccaataacaagcgccaggcactgcacactacttacagcagtgggttcaacactttcggccttgagtggtccgagaagtatctcttcacctatatcaacagccggcttttgcaagtcacttacaccaacttcaataagcccatgtggagtcgaggtggattccctgactctacctccaacggcacaaggctcgtcgacatctggggcaagaccggccttgacaacaccccctttgatcaagagttttatctcatcatgaatctggctgtcggtggcaccaacggctggttcgaagatggccagtctggcaagccttggctggatcaatctcccaatgccaaaaaggacttttggaatgcgcgcgactcttggtaccctacatggacgcagcctcagcttgaggttagtcgcgttgtcattttgcagcaatgcgacggtaacgaggatttgtga

SEQ ID NO: 207 - protein, 622 aa, Ustilago maydis
MATDTTFQADEEKARSNGLRLATDPSCLQRRPPATTESGSESSSSHNSTNSFLKPAAARPFATVSVPIATGVTAVDHDAYTPAASNSTLDLLAKHRSVQMIAWLYDYTGGPEDDDWLHEPGVERKRSLAHLAFGWCNISVRGICNVGSLLLLSSCLLMLFAGYPVLYLFLSRNPDQKATSFFGLGGTNGSGQVPALPLFSLVDSDTPFDAYAWTNPLDRVGYHLVFSDEFETAGRTFWPGDDPFWEAMDLHYWVTGDFEWYSPEAVNTSNGFLNVWMQEEATHNLNFRSGMLQSWNKFCFQGGYVEVSVILPGAHDTEGFWPAIWLLGNLGRAGYAGTTQGMWPYSYSSCDVGTLANQTNAQKTAPAAAINAHGLYSSSYDHKLSFLEGQRCSACTCDGEDHPGPNVGVGRSSPEIDIFEIQVNGAHGAASQSFQIAPFDANYTWDQSPKVAQLHGQDTMFNSYTGGVYQEAVSAVAKIPDTAFASSGGVPVTMGVQYDPDWTGDGTGSITWFLNGKPTWTLSGHSLKANRYTEIGQRIIPTEPMTLVINLALSDGFQKVKWDQVEFPAVMKVDYVRVYQKDGQEDRISCDPDDHPTSKYIHDHLDVYMNPNLTVWDQAKYP

SEQ ID NO: 208 - DNA, 1869 bp, Ustilago maydis
atggcgaccgacacgaccttccaagcagacgaggagaaagctcgctctaacggcttacgtctcgctacagatccatcatgcctgcaacgtcgaccgccagcgaccaccgagtctggctccgaatcctctagctcgcacaacagtaccaattcgtttctgaaacctgccgcggccaggccattcgcaacggtctcagtaccgattgccacaggggttacagctgttgatcacgatgcatatactccagccgcttcgaattcgacattggatctgctcgccaagcatcgatcagttcagatgatcgcttggctgtacgactataccggtggaccagaggatgacgattggctgcacgagcccggggtggaacggaagcgcagcttggcacacctcgcttttggttggtgcaacatcagcgttcgaggcatctgcaatgtgggttcgctgctgttactttcgtcttgcctactgatgctgttcgctggctatcctgtgttgtatctttttctttctcggaatccggatcagaaggccacttcgttcttcggtctgggtggaacgaatggtagcggtcaggttcccgctttgccgttgttctcgcttgtggattccgatacaccgttcgacgcgtatgcgtggactaacccactggatcgagttggctaccacttggtgttcagcgacgaattcgaaacggccggtcggacgttctggcccggcgatgacccgttctgggaagcgatggatctgcactactgggttacgggcgatttcgaatggtactctccggaagcggtcaatacttcgaacggatttctaaacgtgtggatgcaggaagaagcgacgcacaatctcaactttcgatcggggatgctgcaaagttggaacaagttttgtttccaaggtggctatgttgaggtgagtgtgatcctacctggagcgcacgatactgaggggttctggccggcgatctggctgttgggcaatctcgggcgcgcaggctatgcaggtacaacgcaaggcatgtggccgtattcgtactcgagctgcgacgtaggtacgctagccaaccagacgaatgcgcagaaaaccgcgcctgctgcagcgatcaacgcgcacggactgtacagttcgagctacgaccacaaactgagtttcctggaaggccaacggtgttccgcctgtacttgcgatggagaagaccatccgggacccaacgtgggcgtcggacgaagcagcccggagatcgacatttttgagattcaggtcaacggtgcacacggtgcagcttcacagtcgttccagatcgcgcctttcgatgcaaactacacgtgggaccaatcaccaaaagtggcgcaactgcatggacaagatacgatgttcaactcatacacgggtggagtgtatcaggaagccgtgtcagcagtggccaagatccccgatacagcgtttgcgtcgtccggcggcgtaccggtgacgatgggcgtccagtacgatcccgactggaccggcgatggcaccggatccatcacgtggtttctaaacggcaaacccacttggacgctctctggtcactcgttaaaagccaaccggtatacagagatcggtcagaggatcatcccgaccgaaccgatgactctcgtcatcaacttggcgctatccgatggattccaaaaggtgaaatgggaccaagtcgaatttccagctgtgatgaaggtcgattatgtaagggtctatcagaaggatggtcaggaggacagaatctcttgcgacccggacgaccacccgacctcaaagtatatacacgaccatctagatgtgtatatgaatccgaacttgaccgtctgggaccaggcaaagtatccgtaa

SEQ ID NO: 209 - protein, 574 aa, Ustilago maydis
MPARSGAAYHRADNPTSMMSSRPSVQTDSSSSSSSQRYYNASGYPQTSGGYNGRMPAAPLLTDQEDDDDFLYSDKGLDRRSGSCISMRGMLNVLTLILLAMGLLALFLGYPLVVVLSKVFDTIDISPQSAQRLTNLTQRGLIDPDTPQAAMRRRSPVDGTDWHLVFSDEFEQEGRSFWPGDDPYWEAVDLWYWGTGDYEWYSPEAVNTTNGALVISVEARETNNKNFRSGMVQSWNKVCFQGAYYEISARLPGSATVPGFWPGLWTQGNLGRPGYGATNEGMWPYSYQGCDTGALPNQTYINGTGPPAALNANGLFSASYNNELSWLPGMRFTSCNCPGTEHPGPNRNIARSAPELDILEAKIDVGGGHGETSQSLQMAPFDVDYFYGNSTERGDIRIWDANTRLNDYKGGAIQEAVSALSQVPAIAYEQTPGGRYVTFGVEYAPDWNQDGDAYVTWYMDGRPTWTLYGQAIGPVPELDVSQRLVPTEPMFMILNVAISESFQVPDFTQLEFPAHMAIDYVRVYQRDGQPDRVGCDPANRPTYEYIENNKDIYYDRNKTEYPKSKIPRNRLQGC

SEQ ID NO: 210 - DNA, 1725 bp, Ustilago maydis
atgcccgccaggtcaggagccgcctaccatcgggcggacaacccgaccagcatgatgtcctctcggccgtcggtccagaccgattctagcagcagctcttcgtcccaaaggtactataacgcgtccggctaccctcagaccagcggaggctacaacggccgcatgccagcagcaccacttctcaccgaccaagaggatgacgacgactttctatactcggacaaggggcttgaccgtcgctcaggctcatgcatcagcatgcgcggtatgctcaacgtcttgaccttgatcctgctcgccatgggtcttctcgccctttttctcggctacccgcttgttgtggtgctaagcaaggtattcgacacgatcgatatcagcccgcaaagcgcccaacgactcaccaacctgacacaacgcggtctcatcgacccagacacaccgcaagccgccatgcgccgccgatctccggtcgatggcactgactggcacctggttttttccgacgagttcgaacaagaaggtcgatccttctggcccggtgacgatccctactgggaagccgtcgatctgtggtactggggaaccggtgattacgaatggtactctcccgaagccgtcaacacgaccaatggcgcgcttgtcatctcggtcgaagcaagggaaaccaacaacaaaaacttccgctccggcatggtgcagagctggaacaaggtgtgcttccaaggcgcctactacgagatctcggcacgtcttcccggttccgccaccgttcctggcttctggcccggtctctggacacagggcaatctggggcgtcccggatacggtgcaaccaacgagggcatgtggccgtattcataccaaggttgcgataccggcgctttgcccaaccagacgtatatcaatggtactggccctcctgctgctctcaatgcaaacggtctcttctcggccagctacaacaatgagctgtcttggcttcccggcatgcgcttcacctcgtgcaactgccctggtactgaacaccccggtccgaaccgcaacattgctcgatccgcacccgaactcgatatcctggaagccaaaatcgacgtgggtggcggtcacggtgagacgtcgcagtcattgcagatggcaccgttcgacgtggattacttctacggcaacagcactgagcgcggcgacattcgcatttgggacgccaacacgcgtttgaacgactacaaaggtggtgcaatccaggaagctgtttcggcgctcagccaagttcccgcgattgcgtacgaacagacgcctggcggcagatacgtcacgtttggtgtcgagtatgctcctgactggaaccaagacggcgatgcgtatgtgacgtggtacatggatgggcgaccgacgtggaccttgtacggtcaggcgatcgggcctgtccccgaactcgacgtcagccagcgtctcgtccctacggaacccatgttcatgatcctcaacgtggccatctccgagtcgttccaagtgcctgattttacgcagctcgaattcccagcgcacatggccatcgactatgtgcgcgtataccagcgtgacggtcaacccgaccgcgtcggctgcgatcccgccaaccgacccacgtacgaatacattgaaaacaacaaggacatttactacgaccgcaacaagaccgagtaccccaaatcaaagatccctagaaaccgcttgcaaggttgctga

SEQ ID NO: 211 - protein, 565 aa, Ustilago maydis
MSRPYGAASSSARSPPSSTSTSFGATAAAATANPNTARYQLASAGITEEEDDYLHAIDTKWDKSSHGWNLRGFLNILTLASLALGLIMLFLGYPVLIKIKDIYDHDNKGAFGLGGTNGSGQVPALDIASLIDADTPQSALKWTSGYDKSSYHLVFSDEFETDGRTFWPGDDPFWEAVDLWYSGTGDFEWYSPEAVNTTGGAMVIAIEEHETHNKNFRSGMVQSWNKFCFQGGYIEFSVKLPGGPSTSGFWPAVWLMGNLGRPGYLATTEGTWPYSYNACDTGILPNQTFLNGSGPDAAIHSTGTYAYDGKLSFLPGMRYSACTCPGEDHPGPNNNVARSAPEIDIFEVQVQYKNGARHSYASQSLQVAPFDDAYAWGNSSADATIYDDTLTEFNTYTGGQIQEAVSSVTRVPDTGFQLTQNEYVKYGVEFSPDFNYDGSGSMTWYVDGKPSWTVNPKAFPARPDLDISQRIIPVEPMAIVMNLAISSSFQPVNFDEGGITFPAFMSIDYVRVYQKDGQADLLSCDPADHPTANFIHTHMDLYTNRNYTVFPRDKYTWPRNKLQGC

SEQ ID NO: 212 - DNA, 1698 bp, Ustilago maydis
atgtccagaccttacggcgcggcctcctcgtcggctcgtagtccgccttcgagcacgtccaccagcttcggcgcaaccgcagccgcagccacagcaaatcccaacactgcaagatatcagctcgccagtgctggaatcaccgaagaggaggatgattacctccatgccatcgacaccaaatgggacaagtcgtcgcacggctggaatttgcgtggcttcctcaacattcttactctggcatcgcttgcacttggtctcatcatgctcttcctcggctatcccgttctcatcaaaatcaaggacatctatgaccacgacaacaaaggcgctttcggcctcggcggtaccaacggctccggtcaggtccccgctctcgatattgcctcgctcatcgacgctgatacgcctcaaagcgccctcaagtggaccagcggctacgacaaatcctcctaccatctcgttttcagcgacgagttcgaaaccgatggaaggactttctggcccggtgatgatcccttctgggaggccgtcgatctttggtactcgggtaccggcgatttcgaatggtacagccccgaagcagtcaacaccaccggcggcgccatggtcatcgctatcgaagagcacgagacccacaacaaaaactttcgctctggaatggttcagtcctggaacaagttctgcttccagggtggctacattgaattcagcgtcaagctacccggcggtcccagcacaagcggtttctggcccgccgtatggctcatgggcaacctaggtcgtcctggctaccttgccaccaccgaaggcacctggccctactcgtacaatgcctgtgataccggcatcctacccaaccagaccttcctcaacggatcgggtcccgacgctgccattcactcgaccggaacatatgcctacgatggcaaactttccttcctaccaggcatgcgttactcggcttgcacctgtcccggcgaggatcacccgggtcccaacaacaatgtcgcacgttccgcgcccgaaatcgacatctttgaagtacaggtgcagtacaagaacggcgctcgccactcgtacgcctcgcaatcgcttcaggtcgcaccctttgacgatgcttacgcctggggcaactcgtccgctgacgcaaccatctacgacgacacactcaccgagttcaacacctacactggtggccagattcaagaggccgtctcttcggttacgcgcgtgcccgacactggctttcaactgacgcagaacgagtatgtcaagtacggagtcgagtttagccccgatttcaactacgatggcagtggttccatgacttggtacgtcgatggcaaaccgtcatggaccgtcaaccccaaggcgttcccggcgcgtccggacctcgacatcagccaacgcatcatccccgtcgaaccgatggcgattgtcatgaatctggccatatcgagcagtttccagccggtcaactttgacgaaggaggcatcaccttcccggccttcatgtcgatcgactacgttcgtgtctaccaaaaggacggtcaagccgatctcttgtcctgcgatcccgccgatcatcccacggccaactttatccacacgcacatggacctctacaccaaccgaaactacaccgtcttccccagggacaagtatacatggccccgaaacaagcttcagggctgttag

SEQ ID NO: 213 - protein, 679 aa, Ustilago maydis
MSASSAAAAARYQPISTQTPNLSQPRTQPRGSSRIMNRDQDANDRAGLLGQDPDHDVASYSRPFRTDPSPNVSHSNIVQPGRGTSTIHSYSTGSQSTNNGTAMPRFMGAYRATAPNSESDLSVHSSSQFSYATNAEKAAYASKAGAAGIASSFQDEDDDWLHDPKAKSTVGTAESLTSMRGLLNVGTLLLIGLCLLMLFLGYPVLIEIRKKYADGTASASLSTTTTFTTFPVNMKRGLVDQETPQSAYKRTSPVDNSAWHLVFSDEFNTPGRTFWPGDDPFWEAYNGWYSGTNDYEYYSPEAINTTDDGYLQISFEERETNNLNFRSGMLQSWNKACFTGGYLEINAQLPGTPDAAGFWPGLWLMGNLGRPGYNGVNEGIWPYSYAGCDTGALPNQTWINGTGPHHAIVANGQFSYQVNHKLSYLPGLRFPACTCPGEDHPGPNNNVARSSPELDMLEATIGANGGQSSQSLQVAPFDIDYFYNNVSGTDYIIHDRDTTKINGYHGNELQESVSALAAIPDRAYQRHANAGFVNFGVEWEPDMNGDGKGLDGETDAYITWYIDDKPTWTLKASALTGVPELDISRRLIPREAMSMIVNLGMAYNFQPPVWRQLQFPGTLKIDYIRMYQRDGRDDRVSCDPNELPTRKYIERHSDIYQNKNISRFPKDRIPKNRLTHPGC

SEQ ID NO: 214 - DNA, 2040 bp, Ustilago maydis
atgagcgcttcatcagctgcggctgctgcccgctatcaacccatctcgacacaaaccccaaatctgtcccagcctagaacccaacctcgaggctcgagcagaatcatgaaccgagatcaagacgccaacgatagggcgggtctgctaggccaggatccagatcacgacgttgctagttactcgagaccattccgcacagatccttctcccaacgtttcgcattccaacattgttcaacccggcaggggcaccagcacgatccactcttactcgacaggctcacagtcgaccaacaacggcaccgccatgcctcgcttcatgggcgcatatcgcgctacggcacccaactccgagtcggacctcagcgtccactcttcgtcccaattcagttatgctaccaatgccgaaaaggccgcgtacgcctccaaggcgggcgctgctggaatcgcttccagttttcaagacgaggacgacgattggcttcacgatcccaaagcaaagagcacagtcggcactgccgaatccctcacttcaatgcgaggccttctcaacgtcggcacgctccttctcatcggcttgtgtcttctcatgctcttcctcggctaccccgtcctcatcgagattcgcaaaaagtatgccgatggcaccgcttcagcctcgctctccaccacaaccaccttcaccactttccccgtcaacatgaagcgcggcttggtcgatcaagagacaccgcagtcggcatacaagcgtacctcgcccgttgacaattcggcatggcatctggtctttagcgatgagttcaacacgcctggtcgaaccttttggcccggcgatgatcccttctgggaagcctacaacggatggtactcgggtaccaacgactacgagtactactcgcccgaagccatcaacaccaccgacgacggctacctgcagatctcgttcgaggagagggagaccaacaacctcaacttccgttcgggcatgcttcaaagctggaacaaggcctgctttaccggcggttacctcgaaatcaatgcgcagctcccgggaacccccgacgctgccggtttctggcctggtctttggctcatgggtaacttgggccgaccaggctacaacggcgtcaacgaaggtatctggccgtattcgtatgctggatgtgataccggtgcgctgcccaaccagacgtggatcaacggcaccggtccacaccacgccattgtcgccaacggtcaattttcctaccaggtcaaccacaaactctcgtacctgccaggtctgcgctttccggcgtgcacctgtcccggcgaagaccatccgggtcccaacaacaacgtggcgcgtagcagtccggagctcgacatgctcgaagccacgatcggtgccaacggtggtcagtcgtctcagtcgctccaagtggctccgtttgacattgattacttttacaacaacgtgagtggcaccgactacatcatccatgatagagacaccaccaagatcaacggataccatggcaacgagctgcaagagtcggtctctgcgcttgccgcgatccccgatcgagcgtaccagagacacgcgaatgctgggtttgtcaactttggcgtcgagtgggagccggacatgaacggcgatggtaaaggcttggatggcgagacggacgcctacattacgtggtacattgatgacaagcccacgtggacattgaaggcgagcgcactgacgggggtgcccgaactggacatcagcaggcgcttgattccgagagaagccatgtcgatgatcgtcaacctgggcatggcgtacaactttcagcctccggtatggaggcagttgcaattccccggaacactcaagattgactacatacgcatgtaccagcgagacggcagggacgatcgcgtttcgtgcgatccaaacgagctgcctacgcgcaagtacatcgagaggcacagcgacatctaccagaacaagaacatttcgcgcttccccaaggatcgcattcctaaaaataggttgacgcatcctggctgctga

SEQ ID NO: 215 - protein, 919 aa, Ustilago maydis
MTQSAQPDQGSSDQTTAARPTSDANSVALPVSLSFSSTISTISTSEVLDSYQPSNAGSGLPYLDSLPSLAPSRNSQTQATVQHQRESRASSVLSAVASPRLAPRPFDSPSLAHLTPSRSSLDVTAAAETSTPKDAGQDSPTIARSTYDSPDIYIDVPGSTAFNHVQENQRLVAADSPSTSTKRFSKVLHGLGLFGSTSKRNSSLVMKKASNPKHLHIDTSIPVQDPAHTEQRGSAGGPRLSPKPRSEAASPLPSPGVVYKPPIAHHLVGGLGVSHVQGLSSTSSFVSQEGKYPAARTDAFSTGLVPVLNIDDSSSSIYSLNSPRRPYTPGSFTNGPRTPLSATASPSTSYFDEKKLGGATASIIEASLNSSPSATGATHNIKMWGDYDAESEPDDYLHEPDAEKYRNASSAKEMLSPRGLLNIGTLTVIGLGLILLFGGYPVISWLSRSKASTKGGFNLGGANATGQVADLKIGRGLIDPDTPESVKTRTTLNGSGKKMNLVFSDEFNRDGRSFYPGDDPFWTAVDLHYWGTENYEWYDPSAVTTANGSLVITLDEVPTHNLNFRGGMLQSWNQFCFTGGYIEVSMVLPGAPDVAGLWPAAWTMGNLGRAGYGASTDGMWPYTYDSCDVGTLPNQTYVNGTGPIAAQTTGVYVEKYGPYLSYLPGQRLSRCTCNSSNDHPGPRHADGTWVGRSAPEIDIIEAAASHTRGSRGHASMSAQIAPFNTGYNLTDGPGTTEFFSDDAALNSYTGSPLQQAASGLVYTKRGAYQETLGQFSSYGYEYNPGSDPDSYILWTLDGAPMWQLNSKALGPDAGTQISQRPIPYEPMYILLNLGISSSFTTVDWRHLNWPAKMLVDYVRVWQVEGEENIGCDPENAPTAAYIEAHKEVYYNANLTTWTEPKEKGGYGAKFPGNSMLGQC

SEQ ID NO: 216 - DNA, 2760 bp, Ustilago maydis
atgacacaatcagctcaacccgaccagggttcatccgatcaaacaactgccgcacgaccaacatcggatgctaactctgtggcactgcccgtctcgctttctttctcttccaccatctccaccatctctaccagcgaagtgctcgactcgtatcaacccagcaacgcggggtcaggtctgccttatctcgactcactgccatcactcgctccatcgcgtaatagccagacacaggcgacggtacaacaccaaagggagagcagagcttcctcggtcttgtcggctgtagcatcgcctcgtcttgctcctcgtccattcgattctccttcactcgctcatctaactccctcaaggtcttcgctcgacgtgactgccgctgcagagacatcgacgcccaaagacgcgggtcaagattcgcccacaatagctagatcgacgtacgatagcccagacatctacatcgacgttcctggaagcaccgcattcaatcacgtccaggagaaccagaggctcgtcgctgccgactcgccatccacatccactaagcgcttctccaaagtcttgcacggcctgggcctgtttggttctacttcgaagcgtaactcgagcctcgtaatgaagaaggcctctaatcctaagcatcttcacatcgatacttcgatacctgtgcaagatcccgctcacaccgaacagcgcggcagtgcaggcggtcccagactgtcgccaaagcctcgatcggaagcagcaagccctcttccttcgcctggagttgtgtacaagccccccattgcacaccatcttgtaggtgggctaggtgtcagtcatgtacagggcctttcttcaacgtcgagcttcgtatcgcaagagggcaagtaccccgctgcacgaaccgacgccttttccacaggtctagtacctgtactcaacattgacgattcgtccagctccatctactcgctcaatagcccacgtcgaccgtacaccccaggcagcttcacaaatggacctcgaactcccctctctgctactgcttcaccctctacttcctactttgatgagaagaagctcggaggtgcaactgcatccataatcgaggcgtccctaaacagttcgccgtcagcaactggcgctacacacaatatcaagatgtggggcgactacgatgccgaatcggagccggacgactacctccacgagccagatgcggaaaagtatcgcaacgcatctagtgcaaaggaaatgttgtcaccgcgtggccttctcaacatcggaacgcttactgtcatcggtttaggcctgattctgctgttcggtggttaccccgtcatctcttggttgtctagatccaaggcgtcgaccaaaggtggcttcaatctgggcggtgccaacgcaaccggccaggtggctgatctgaaaattggcagaggcctcatcgatccggatacgcccgaaagtgtcaagacgcgcaccacgctcaatggctccggtaagaagatgaacttggtctttagcgatgaattcaatcgcgatgggaggagtttctaccctggcgacgatccgttttggactgcggtagacctgcattattggggaacagagaattacgagtggtacgatcccagcgctgtgaccaccgcgaatgggtcgttagtcatcacgctggacgaggttccgacgcacaacctgaatttcaggggcggaatgctgcaatcctggaaccaattttgcttcaccggtgggtatattgaggtatccatggtgctacctggtgcacctgatgttgctggtctgtggccggctgcttggacgatgggcaaccttgggcgtgccgggtacggtgcttccaccgatggaatgtggccatacacgtacgactcgtgcgatgttggcacgcttcccaatcagacctacgtcaacggtacaggaccgattgctgcccaaacaacgggtgtctacgtcgagaaatacggtccttatctctcctaccttcccggtcagcgattgagtcgatgcacgtgcaacagctcgaatgaccaccctggaccacgccacgccgatggcacgtgggttggtcgctcagcgcccgagatcgatatcatcgaagctgccgcttctcacacgcgtggatcgcgcggtcacgcctccatgtctgcgcagatcgcccccttcaacacgggttacaacctcacagacggacctggcaccaccgaatttttctccgacgatgcagcgctcaactcgtacaccggctcgcccctgcaacaagcagcatctggtttggtttatacaaagcgtggcgcataccaagaaacgctgggtcaattttcgtcctatggatacgaatacaatccgggctccgaccctgactcttacattctctggacgctggacggcgcaccaatgtggcaactcaactcgaaagcgcttggtccagatgcaggcacccaaatcagtcaacgacctatcccgtacgaacccatgtacatcctgctcaacctggggatctcgtcgagcttcaccacggtagattggcgtcatctgaattggccggcgaagatgctggtcgattacgtgagggtttggcaagtcgagggtgaggagaacatcggttgcgatccggagaatgccccgactgcggcgtacattgaagcgcacaaagaggtgtattacaacgctaacctgacgacctggacagagccgaaagaaaaaggagggtacggtgccaagttcccgggcaactcgatgcttggccagtgctga

SEQ ID NO: 217 - protein, 454 aa, Pseudocercospora fijiensis
MESFHGTATTTATNTPRPGTPESDPIEPVHRQNPFASPYASMPASTMASSTAIQALPPPRYFHSRRINKEEVEKPWLEKKDPKEKWVTIIPIIGIFIGLALSAFLIYEGLQTVQNHTYCPVLDDDFSAGLNGKVWTKEVEVGGFGNGQFEMTTNTDENAFVQDGMLVIKPSLQDEKLVESNNVINLLKDGICSSDLWSNCVAVTNTTNGTIVNPVKSARISTKKGASIKFGRVEVVAELPAGDWLWPAIWMLPVNDTYGPWPNSGEIDIMESRGNNYSYPQGGNNIVSSALHWGPDAANDAWWQNNVKRESLHTTYSAGFHTFGLEWSEKYIFTYIDTRLLQVLYTNFNKPFWQKGDFPASDSNGTRLVDPWSQTGRDSTPFDQDFYLILNVAVGGTNGWFDDGVAGKPWVDASDTAKHDFWNARDQWYPTWEKQGQMNIKSVKMWQQQGYNGC

SEQ ID NO: 218 - DNA, 1365 bp, Pseudocercospora fijiensis
atggagtccttccatgggacggccaccacaacggccaccaacaccccaaggcctggcaccccagaaagcgaccccatcgaacctgtgcatcgacagaacccattcgcttcaccttatgcatccatgccagcatcaactatggcatcttctactgccattcaagcactcccaccaccgagatactttcactctcgccgaataaacaaagaagaagtggaaaagccttggttggagaagaaggatccgaaagagaaatgggtgaccataattccaatcattggcattttcatcggtcttgcactttccgcattcctgatctacgaaggtctgcagaccgtccaaaaccacacttactgcccagtcctcgatgacgacttctctgctgggctcaatggcaaagtttggacaaaggaggtcgaagtgggaggctttggcaatggccaattcgagatgactacgaacacagacgagaacgcattcgtccaggatggaatgctcgtaatcaagccgagtctacaagacgagaaattggttgagtccaacaacgtaatcaaccttctcaaggatggcatttgctcttctgatctctggtccaactgtgtggccgtgaccaataccacaaacggaacgatcgtcaaccccgtcaagtccgctcgcatcagcaccaagaaaggcgctagcatcaagttcggtcgtgttgaggttgtcgccgagctaccagcgggagactggttgtggcctgcaatctggatgttgccggtcaacgacacctacgggccgtggccaaattccggcgaaattgacatcatggaatcccgtggcaacaactactcctacccacaaggcggcaacaatattgtctcttcggcattgcactggggtccggatgcagcaaatgatgcctggtggcaaaacaacgtcaagcgtgaatcgctgcacaccacatactccgcaggcttccacacatttggcttggaatggagcgagaagtacattttcacctacatcgacacacgtctcctacaggtcctctacaccaacttcaacaagcctttctggcaaaagggtgatttccccgcctcggattcgaacgggaccagactcgtcgacccgtggagccagacaggccgtgacagcactcccttcgatcaggacttttacttgattctcaatgtcgccgttggaggtacgaacggctggttcgacgacggcgtcgcaggcaagccttgggtcgatgcttcggacactgccaagcatgacttctggaacgcacgtgaccagtggtacccaacatgggagaagcaaggacaaatgaacatcaagagtgttaagatgtggcagcagcagggctacaatggttgctag

SEQ ID NO: 219 - protein, 476 aa, Verticillium alfalfae
MDREGDYAREGQAYYGRSVTGGPAPSAATTAATTPQYRPGTPNTDNAGRNPFGDGLESQASVRSAIPTGASTNPFASPNNSRPPSSYGSSSARATGMFDERSQRYFHSRRIRKEDIEKPWLQKTHPKEKWVTILPIIGILIGLGISGFLIWDGINSVIKHKYCIVLDDDFAGGLSSSTWTKEVEVGGYGNGQFEWTTGGDENVFVKDGHLVIRPELTDSALIEKDTEINLLEDGTCTSDKPFNCITATNTTSGNATIVQPVKSGRIHTKGGVRIKYGRVEVTARLPKGDWLWPAIWMMPRARHGGNDIASSALHWGPDPANDAWWRTNNKRQALKTTYADGFNTFGLEWSQKYLFTYVNSRLLQVMYTNFDKPMWKRGNFPEANANGTRLNDIWSETGRSNTPFDQYFYLIINLAVGGSNGWFEDGKSEKPWLNGSPNAKKDFWEARDTWLPTWTKPELEVKHVKIWQQCNGDEEL

SEQ ID NO: 220 - DNA, 1431 bp, Verticillium alfalfae
atggatcgtgaaggcgactacgcccgcgaggggcaagcctactacggccgctccgtgaccggtggtcccgctccctcagcggcgaccactgctgccaccacgcctcaataccgccctggcacccccaacacagacaacgccggccgcaacccctttggcgatggcctcgagtcgcaggcgtctgttcgctccgccattcccaccggtgccagcacgaatccctttgcgagtcccaacaactctcggcccccgtcaagctacggctcatccagtgcccgcgccacgggcatgttcgatgagcgctcgcagcgttacttccactcccggagaatccgcaaggaggacatcgagaagccatggctccagaagacgcaccccaaggagaaatgggtcaccatcctccccatcattggtattctgatcggtctcggcatctccggcttcctcatctgggacggcatcaacagcgtcataaagcacaagtactgtatcgtgcttgacgacgacttcgccggcggcctcagctccagtacctggaccaaggaggtcgaggttggcggctacggcaatggccaattcgagtggaccaccggtggtgacgagaatgtcttcgtcaaggatggtcatctcgtcatccgacccgagctcactgactcggccctcattgagaaggacaccgagatcaacctgctcgaggatggcacctgcacgtcggacaagcccttcaactgtatcactgccaccaacacaacttcgggcaacgccaccattgtccagcctgtcaaatccggtcgtatccacaccaagggcggcgttcgcatcaagtatggccgtgtcgaggtcactgctcgtcttcccaagggcgactggctgtggcccgccatctggatgatgcctcgagcgcgacacggcggcaacgacattgcctcatcagcgctgcactgggggcccgatccggccaacgacgcctggtggcgcaccaacaacaagcgtcaggccctcaagacgacctacgcggatggcttcaacacgtttggcctcgagtggtcccagaagtacctcttcacctacgtcaacagccgtctgctgcaagtcatgtacaccaactttgacaagcccatgtggaagcgcggcaacttccccgaggccaatgccaacggcacccgtctcaatgacatttggtccgagacgggacgctccaacacaccctttgaccagtacttctacctcatcatcaaccttgcagttggtggtagcaacggctggttcgaggacggcaagtccgagaagccctggctcaacggctctcccaacgcgaagaaggacttctgggaggcccgtgacacttggctgcccacatggaccaagcccgagctggaggtcaagcacgtcaagatctggcagcagtgcaacggtgacgaggagctctga

SEQ ID NO: 221 - protein, 500 aa, Verticillium dahliae; identical to SEQ ID NO: 109

SEQ ID NO: 222 - DNA, 1503 bp, Verticillium dahliae; identical to SEQ ID NO: 110

SEQ ID NO: 223 - protein, 448 aa, Alternaria solani
MQNLTETPDIITSVAPSVAASERVHNSKSTNSRHISKGKQAAGSGFHYGPVPGQYFRSRRVKPEDVQMPWLEKPHPRQKWGTILPLIGLGLGFMVVAIMIWDGFRVIGRHKYCEIYHDNFTSLNENVWTKEVELGGYGNGQFEMTTGTDENVFIENGELVIRPTIQDEQFIGSNYTIDLRGQGCTGSDWTDCVATTNTTNGTIVNPVKSGRINTKLGASIKYGRVEVVAKLSAGDWLWPAIWMLPKDNVYGPWPRSGEIDIAESRGNAPGYAQGGNNVVSSTLHFGPDANHNGWWRNNVKRQALHTTYADDYNTFGVEWSEKYIFTYINTRLLQVMYTHFDEPFFKYGNFPQADANGTRLEDPWKGTKSNTAPFDQEFYLVINLAVGSTNGWFEDGKSGKPWIDRSPRAKLDFWEAKDQWLPSWKNNGKMKVKSVTMWQQSGHMGCKA

SEQ ID NO: 224 - DNA, 1347 bp, Alternaria solani
atgcagaacctcacagaaacccctgatatcatcacctctgtagccccttcagtggctgcttcggagagagtccacaactcgaaaagcaccaacagcaggcacatctccaagggcaagcaagctgcaggctctggcttccactacggacccgtaccaggccagtatttccgctcacgacgagtgaagcccgaagatgttcagatgccgtggctcgagaagccgcaccccaggcagaaatggggcacaattcttcctctcatcggccttggactcggtttcatggtagtagctatcatgatctgggacggcttcagagtcataggcaggcacaaatactgcgagatctaccatgataattttacctcgctgaacgagaacgtctggaccaaggaagtggagctaggcggctacggtaatggccagttcgagatgaccacaggtacggacgagaacgtcttcatcgagaacggtgagctcgtcatcagaccaacgatccaagacgaacagttcatcggcagcaattacaccatcgatctccgtggtcaaggatgcactggctctgattggactgactgtgtcgctactaccaatacgaccaacggcacaattgttaaccctgtcaagtccgggcgaatcaacaccaagcttggtgcttcaatcaagtatggccgcgtcgaagtcgttgccaagctgtccgctggtgactggttgtggcccgccatctggatgttacccaaggacaacgtatacggcccctggcctcgctctggcgaaatcgatatcgcggagtcacgcggtaacgctccggggtatgcacaaggcggcaacaatgtcgtctcaagcacgctgcacttcggacctgacgccaatcataatggctggtggcgcaacaatgtcaagcgccaggcgctgcacactacatacgcagacgactataatacctttggtgttgagtggagtgagaagtacatcttcacttatatcaacacacgcctcctacaagtcatgtacacgcactttgacgagccctttttcaagtacggtaactttcctcaagccgatgccaacggcacccgcctggaggatccatggaagggcaccaaaagtaacacagcaccctttgaccaggagttctatcttgtcataaaccttgctgtcgggtcaacaaatggctggtttgaggatggtaagagcggtaagccatggattgacaggagtcctcgggcaaagcttgacttttgggaggccaaggaccagtggctgccttcgtggaagaacaatggaaagatgaaggttaagagtgttacaatgtggcagcaaagtggacacatgggctgcaaggcttga

SEQ ID NO: 225 - protein, 545 aa, Cercospora beticola
MHRVPLYALHSPSSCRIETCKVAAAWAIELKHLRSVCGSAQQIGLHLLRGTSLPVNFASLAESVSFPPLIKEELGPPLLSSLGQQSHCAGEMDYQHGTATTTATNTPRPGTPDSDPIERAPPRNPFASPYGSMPASAMGSSTGFQSTAPPRYFHSRRINKDEIEKPWLEKKDPKEKWSTIIPIIGMVVGLGLVGFLIYEGMQTVQNHVYCPVLDETFSGGLNPSVWTKEVEVGGFGNGQFEMTTNTDENAFLKDGMLHIKPTLQDASLIESNNVIDYLKSGECSSDIWSNCVAVTNTTNGTIINPVKSARLSTKAGAKIRYGRVEVVAQIPEGDWLWPAIWMLPVNNTYGPWPASGEIDIMESRGNNYTYPMGGNNIVSSTLHWGPDPGNDAWWRNNVKRKALHTTYSSQFHTYGLEWNEKYIFSYIDTRLLQVMYVNFDKPFWPKGNFPASDQNGTRLVDPWSQTGQDSTPFDQDFYLILNVAVGGTNGWFEDGVNGKPWVDASDTAKRDFWNARSQWLPTWEKKGEMVIKSVKMWQQQGYNGC

SEQ ID NO: 226 - DNA, 1635 bp, Cercospora beticola
atgcaccgtgtgccactctacgcactgcattcgccgagttcttgccgcatcgagacgtgcaaagtggctgcagcatgggccattgaactcaaacatctgagatccgtgtgcgggagtgctcagcagataggccttcacttattacgtggaacctctctgccagtgaactttgcctctctagctgaaagtgtcagcttcccgccgctcatcaaagaagagcttggcccgcccttgttgagctcactcggccagcagagccattgtgcaggcgagatggactaccaacatggcacggccaccacaacggcgaccaatacgccgcgtccgggcacacctgatagcgacccgatcgagcgtgcaccaccgagaaacccattcgcttctccatatggctcaatgccagcatctgccatgggctcttcgactggtttccagtccaccgctcctcctcgctacttccactctcgccgaatcaacaaggacgagatagagaagccttggctggagaagaaggatcccaaggagaaatggagcacgatcattcccatcattggcatggtcgtcggcttgggactggtcggcttcctcatctacgaaggcatgcagacagtgcagaatcacgtttattgtcccgtactggacgagactttctcgggtggtctcaacccaagtgtgtggacaaaggaagtggaggttggaggattcggtaacgggcaattcgaaatgaccaccaacaccgacgagaatgctttcctcaaggatggcatgctacatatcaagcccacgctccaagatgcatcccttatcgaatcgaataatgtcatcgattatctgaagagcggtgaatgttcctctgatatctggtcaaactgcgttgcggttaccaataccacaaacggtactatcatcaatcctgtcaagtcggcccgtctgagcacaaaagccggagcaaagattaggtacgggcgcgtcgaagtagtcgcgcagattccagagggtgattggctctggccagccatctggatgttgccggtaaacaacacctatggtccatggcccgcatccggagagattgacattatggaatctcgaggtaacaactatacctacccaatgggaggaaacaacattgtgtcatccacacttcattggggtcccgatcccggcaacgatgcctggtggcgcaacaacgtgaagcgaaaagcgctgcacacaacttacagctctcaattccacacctacggacttgagtggaacgagaaatacattttcagctacatcgacacgcgcctcttgcaagtcatgtacgtcaatttcgataagcccttctggccaaagggtaacttccctgcctccgatcagaacggaacccgacttgtggacccgtggagccagactggccaggacagtacgcctttcgatcaagatttctacttgatcctcaacgttgccgtgggaggcacgaatggttggttcgaagacggcgtcaacggcaagccatgggttgatgcttccgacactgcgaaacgagacttctggaacgcccgatcacaatggctgcctacctgggaaaagaagggagagatggtcatcaagagcgtcaagatgtggcagcaacaaggatacaatggttgc

SEQ ID NO: 227 - protein, 504 aa, Magnaporthe oryzae; identical to SEQ ID NO: 155

SEQ ID NO: 228 - DNA, 1515 bp, Magnaporthe oryzae; identical to SEQ ID NO: 156

SEQ ID NO: 229 - protein, 623 aa, Puccinia graminis
MPSDDIHLTSKASHIDEASESSFAGELSDEKANWAPADNRASVMNAIYSDQNYLSSASYLLGANQRPDSAASSYPSFRGSQIDPGKASRRSYMEDYQDFDAELEDELHNDDGDDDEDNLTGSPKKSKLACGNLFPMRGILNMGAVMLLALALVTIFGILPILTYYGAHRATKQLAVNSGGFNLGGINASGQVPLIHNLAGVIDPATPQSVMSRKGFDGTQYNLVFSDEFNTDGRTFWPGDDPYWEAVDLHYWATGNLEWFDPDAITTNNGNLNITITKELIHDLNYRSGMLQSWNKFCFTGGYIEVSISLPGSPRISGFWPGAWTMGNLGRAGYGATTDGTWPYSYNSCDLGTLKNQTNVAGTGPAAALRAPGGGPLSYLPGQKLSSCTCPGGEHPGPNVKTGRGSPEIDIIEAQVTSPGTGGNIGQASQSVQFAPFDDGYNWQEDGARVYNPRVSNINAYKGGIYQEAVSVVSTTDQTAYEATGGNFQIFGFEYTTGPKGSITWSAGDTATWTMSSSAVGPNPNVQISQRVVSEEPMYIILNLAISEAFETVDAAHLPTPARMLVDYVRVYQRKGQENIGCSPKNFPTESYINKHINAYTNPNLTTWDQAGYTFPKNSLTGC

SEQ ID NO: 230 - DNA, 1872 bp, Puccinia graminis
atgccctcagatgacattcatctgacctcaaaagcgtcccacattgacgaggcatcggaaagttcgtttgctggagaactgagcgatgagaaggccaactgggctcccgccgataaccgcgcttccgtcatgaacgcgatctatagtgaccaaaactacctttccagcgcgtcctacttactcggtgcaaatcaacggcctgattcagcagcaagctcgtatccttccttccggggcagtcaaatcgacccggggaaagccagtcgacgatcctacatggaagattatcaagacttcgatgcagagctggaggacgagctgcataatgacgatggagatgatgacgaggataacctgactggctcacccaaaaagtccaagctcgcatgtggcaacttgtttccgatgagagggattctgaacatgggcgcagtgatgttgctagcattagccctagtgactatctttggtatccttccgattctcacttactatggcgctcaccgtgcaaccaaacaacttgccgtcaacagtggcggatttaacttgggaggaatcaatgcctcaggccaagtgcctctgatacacaatcttgctggtgtcatagaccccgcaactccccagagcgttatgtcccggaaaggattcgatggaacacaatacaacttggttttttctgatgagttcaataccgatggtcgcactttctggccgggggatgatccttactgggaagctgttgacctgcactattgggctactggtaacttggagtggtttgaccccgacgccatcaccacaaacaacgggaacctgaatatcaccatcaccaaagaactgatacacgatctgaattaccgctccggaatgctgcaatcgtggaacaaattctgctttactggggggtacattgaagtttcgatcagtttgcctggatctccccggatttccggcttctggccaggggcttggacgatgggaaaccttggaagagctggatatggagcaacaacagatgggacttggccctactcctataattcttgtgatcttggcactttgaagaaccaaaccaacgtagccggaacagggccagcagccgctttacgtgcaccgggtggagggcccttatcctacctccctggtcaaaagctgtcttcttgtacttgcccagggggcgaacatcctggccctaacgtgaaaacgggcaggggatctcctgagatcgatatcatcgaagcccaagtcacgtcacccggtaccggcgggaatattggacaggcctcacaatccgttcaatttgctcctttcgatgatggatacaattggcaagaggatggcgcaagagtctacaatccccgagtttccaatatcaacgcctacaagggtggaatctatcaagaagctgtatcggttgtgtcgaccactgatcaaactgcctatgaagctactggcggtaacttccaaatatttggattcgaatacacgactggtcctaaaggctcaatcacttggtcagctggagatactgcgacgtggactatgtcttcctctgccgttggacccaacccaaacgttcaaatttcccagcgagttgtcagcgaggaaccgatgtatatcatcttgaacctggctatctctgaggctttcgagacggtcgatgctgctcatctgccaactcctgctcggatgctggtggactacgtgcgggtgtaccagaggaaggggcaagagaatatcggctgttcaccaaagaatttcccaactgaaagttacatcaacaagcacatcaatgcttacaccaatccgaacctgactacttgggatcaagccggctacacatttccgaagaattcacttaccggttgctaa

SEQ ID NO: 231 - protein, 574 aa, Puccinia triticiana
MIGEAKQHLKEASQLDEASETSLAGEMSDEKANWAPADNRASVMNAIYSDQNYLSSASYLLGSNQRPTSAASSYPSFRGSQIDPRRVSRRSYMEDYQDFDAELEDELHNDEGDDDDDNLNGSPKKKSVLVCGNFFSMRGILNMGAVLLLALALVTIFGVLPVITYLGSHRATKQLAVNSGGYNLGGINGSGQVPLIHNLAGVIDPTTPESVMSRKGFDGTQYNLVFSDEFSTDGRTFWPGDDPYWEAVDLHYWATGNLEWFDPDAITTNNGNLNITLTKEMIHDLNYRSGMLQSWNKFCFTGGYIEVSISLPGSPRISGFWPGAWTMGNLGRAGYGATTDGTWPYSYNSCDLGTLQNQTNVARTGPAAALRAPGGGSLSFLPGQKLSSCTCPGGDHPGPSVKAGRGSPEIDIIEAQITAPGSGVNIGQASQSVQFAPFDDGYNWKEDGATVYNPRTSAINTYKGGIYQEAVSVVSTTDQTAYEATGVGDTATWSMASSAVGPNPNVQISQRVVSEEPMYIILNLAISEAFQTVDVAHLPTPARMLVDYVRVYQKQGQENIGCSPKNFPTESLYI

SEQ ID NO: 232 - DNA, 1725 bp, Puccinia triticiana
atgatcggagaggctaagcagcatctgaaagaagcgtcccaacttgacgaagcatcggaaacttcgcttgccggggaaatgagtgacgagaaggcgaactgggcccccgccgacaaccgcgcgtccgtcatgaacgccatttacagtgatcaaaactacctttcgagcgcgtcctatttgcttggttccaatcaacggccaacatcagccgcaagctcgtacccatccttcagaggcagccaaattgaccctcgcagagttagccgccgctcctacatggaagattatcaagatttcgatgcagagctggaagatgagctgcacaatgacgagggtgatgatgacgatgacaacctgaatggctcaccaaagaagaaatccgtacttgtctgtggcaatttcttctcgatgagaggcattttgaatatgggagctgtgttgttgctcgcattagccctggtgaccattttcggagtccttccagttatcacttacttaggctctcaccgtgcaaccaaacaacttgccgtcaacagtggcggatataatttgggagggatcaatggctcgggtcaagtgcctctcatacacaacctcgcgggtgtcatagatcccacgacacccgaaagcgtcatgagccggaaaggcttcgacggaacacagtataatttggttttctctgacgagttctcaacggacggtcgcactttctggccgggggatgacccttactgggaagctgtcgacttgcattattgggccactggtaacttggaatggtttgaccccgacgccatcacgacaaacaacggcaacctgaacattaccctcactaaggaaatgatccacgacctgaactaccggtcaggaatgcttcaatcatggaacaaattttgtttcactggaggttacatcgaggtttcgatcagcttgcctggatcacccagaatttctggtttctggccaggagcttggacaatgggcaacctcggaagagctggttatggcgcaacaacagatggaacgtggccttactcttacaactcttgtgacctcgggactttacaaaaccaaactaacgtagctcgaacaggaccagcagctgctttgcgtgcgccgggtggagggtcgttgtcgttcctccccggacaaaagttgtcttcttgtacttgtccaggtggcgaccatccagggcctagcgtaaaagccggcaggggatccccagagatcgacattatcgaagcacaaatcacggcgcccggcagcggtgtgaatattggacaagcctcacaatccgtacaattcgcaccattcgatgacggatacaattggaaagaggatggagcgacagtttataatccgcgaacttccgccattaacacctataagggcgggatttatcaagaagccgtgtccgttgtttcgacaactgatcaaactgcatatgaagctaccggcgttggagatactgcaacatggagcatggcctcatcggctgttggacccaatccaaacgttcagatttcgcagcgagttgttagcgaagaacctatgtatattattctgaacctggctatttctgaagcattccagacggtcgatgttgcacatctgccgacaccagctcgaatgctagttgattacgtgcgggtgtaccagaaacaaggacaagagaacattggttgttcaccgaagaattttccaactgaaagtctctacatttga

SEQ ID NO: 233 - protein, 264 aa, Artificial Sequence
  Consensus sequence 1 KRE5
  VARIANT (3)..(3): Xaa can be any naturally occurring amino acid
  VARIANT (5)..(5): Xaa can be any naturally occurring amino acid
  VARIANT (10)..(10): Xaa can be any naturally occurring amino acid
  VARIANT (16)..(18): Xaa can be any naturally occurring amino acid
  VARIANT (20)..(21): Xaa can be any naturally occurring amino acid
  VARIANT (24)..(30): Xaa can be any naturally occurring amino acid
  VARIANT (37)..(38): Xaa can be any naturally occurring amino acid
  VARIANT (46)..(46): Xaa can be any naturally occurring amino acid
  VARIANT (48)..(48): Xaa can be any naturally occurring amino acid
  VARIANT (51)..(52): Xaa can be any naturally occurring amino acid
  VARIANT (54)..(54): Xaa can be any naturally occurring amino acid
  VARIANT (56)..(56): Xaa can be any naturally occurring amino acid
  VARIANT (58)..(58): Xaa can be any naturally occurring amino acid
  VARIANT (60)..(61): Xaa can be any naturally occurring amino acid
  VARIANT (65)..(65): Xaa can be any naturally occurring amino acid
  VARIANT (68)..(68): Xaa can be any naturally occurring amino acid
  VARIANT (72)..(72): Xaa can be any naturally occurring amino acid
  VARIANT (74)..(74): Xaa can be any naturally occurring amino acid
  VARIANT (79)..(79): Xaa can be any naturally occurring amino acid
  VARIANT (90)..(90): Xaa can be any naturally occurring amino acid
  VARIANT (95)..(98): Xaa can be any naturally occurring amino acid
  VARIANT (104)..(104): Xaa can be any naturally occurring amino acid
  VARIANT (107)..(107): Xaa can be any naturally occurring amino acid
  VARIANT (110)..(110): Xaa can be any naturally occurring amino acid
  VARIANT (112)..(114): Xaa can be any naturally occurring amino acid
  VARIANT (116)..(119): Xaa can be any naturally occurring amino acid
  VARIANT (121)..(121): Xaa can be any naturally occurring amino acid
  VARIANT (123)..(124): Xaa can be any naturally occurring amino acid
  VARIANT (126)..(128): Xaa can be any naturally occurring amino acid
  VARIANT (131)..(138): Xaa can be any naturally occurring amino acid
  VARIANT (144)..(145): Xaa can be any naturally occurring amino acid
  VARIANT (149)..(151): Xaa can be any naturally occurring amino acid
  VARIANT (153)..(153): Xaa can be any naturally occurring amino acid
  VARIANT (155)..(155): Xaa can be any naturally occurring amino acid
  VARIANT (168)..(169): Xaa can be any naturally occurring amino acid
  VARIANT (172)..(173): Xaa can be any naturally occurring amino acid
  VARIANT (178)..(178): Xaa can be any naturally occurring amino acid
  VARIANT (181)..(182): Xaa can be any naturally occurring amino acid
  VARIANT (184)..(185): Xaa can be any naturally occurring amino acid
  VARIANT (191)..(191): Xaa can be any naturally occurring amino acid
  VARIANT (194)..(194): Xaa can be any naturally occurring amino acid
  VARIANT (203)..(203): Xaa can be any naturally occurring amino acid
  VARIANT (206)..(208): Xaa can be any naturally occurring amino acid
  VARIANT (211)..(212): Xaa can be any naturally occurring amino acid
  VARIANT (214)..(216): Xaa can be any naturally occurring amino acid
  VARIANT (220)..(226): Xaa can be any naturally occurring amino acid
  VARIANT (227)..(231): Xaa can be any naturally occurring amino acid or a gap
  VARIANT (233)..(233): Xaa can be any naturally occurring amino acid
  VARIANT (239)..(239): Xaa can be any naturally occurring amino acid
  VARIANT (242)..(242): Xaa can be any naturally occurring amino acid
  VARIANT (244)..(244): Xaa can be any naturally occurring amino acid
  VARIANT (249)..(249): Xaa can be any naturally occurring amino acid
  VARIANT (252)..(252): Xaa can be any naturally occurring amino acid
  VARIANT (254)..(255): Xaa can be any naturally occurring amino acid
  VARIANT (259)..(260): Xaa can be any naturally occurring amino acid
  VARIANT (263)..(263): Xaa can be any naturally occurring amino acid
INXFXVASGXLYERMXXXMXXSVXXXXXXXVKFWFIXXFLSPSFKXFXPHXXAXYXFXYXXVTYXWPXWLRXQXEKQRXIWGYKILFLDXLFPLXXXXVIFVDXDQXVRXDXXXLXXXXLXGXXYXXXPMXXXXXXXXGFRFWXXGYWXXXLXGXPYHISALYVVDLXXFRXXAAGDXLRXXYXXLSADPXSLXNLDQDLPNXMQXXXPIXXLXXXWLWXXXXXXXXXXXXAXTIDLCXNPXTXEPKLXRAXRXXPEWXXYDXE

SEQ ID NO: 234 - protein, 264 aa, Artificial Sequence
  Consensus sequence 2 KRE5
  VARIANT (58)..(58): Xaa can be any naturally occurring amino acid
  VARIANT (113)..(113): Xaa can be any naturally occurring amino acid
  VARIANT (155)..(155): Xaa can be any naturally occurring amino acid
  VARIANT (207)..(207): Xaa can be any naturally occurring amino acid
  VARIANT (230)..(231): Xaa can be any naturally occurring amino acid or a gap
INIFSVASGHLYERMLNIMMVSVMKHTKHTVKFWFIEQFLSPSFKDFIPHMAAEYGFXYEMVTYKWPHWLRQQKEKQREIWGYKILFLDVLFPLSLDKVIFVDADQIVRTDMXELVNHDLEGAPYGFTPMCDSRTEMEGFRFWKQGYWANYLRGXPYHISALYVVDLRRFRQLAAGDRLRQQYHALSADPNSLSNLDQDLPNNMQFXLPIHSLPQEWLWCETWCSDESLXXAKTIDLCNNPQTKEPKLDRARRQVPEWTVYDDE

SEQ ID NO: 235 - protein, 54 aa, Artificial Sequence
  Consensus sequence a1 KRE6 ascomycetes
  VARIANT (4)..(9): Xaa can be any naturally occurring amino acid
  VARIANT (11)..(11): Xaa can be any naturally occurring amino acid
  VARIANT (13)..(16): Xaa can be any naturally occurring amino acid
  VARIANT (19)..(19): Xaa can be any naturally occurring amino acid
  VARIANT (22)..(22): Xaa can be any naturally occurring amino acid
  VARIANT (26)..(26): Xaa can be any naturally occurring amino acid
  VARIANT (29)..(31): Xaa can be any naturally occurring amino acid
  VARIANT (34)..(51): Xaa can be any naturally occurring amino acid
  VARIANT (53)..(53): Xaa can be any naturally occurring amino acid
GDWXXXXXXMXPXXXXYGXWPXSGEXDIXXXRGXXXXXXXXXXXXXXXXXXHXG

SEQ ID NO: 236 - protein, 54 aa, Artificial Sequence
  Consensus sequence a2 KRE6 ascomycetes
  VARIANT (19)..(19): Xaa can be any naturally occurring amino acid
  VARIANT (22)..(22): Xaa can be any naturally occurring amino acid
  VARIANT (39)..(39): Xaa can be any naturally occurring amino acid
  VARIANT (42)..(42): Xaa can be any naturally occurring amino acid
GDWLWPAIWMMPVDDTYGXWPXSGEIDIMESRGNNWTYXQGXGNNIVSSALHWG

SEQ ID NO: 237 - protein, 48 aa, Artificial Sequence
  Consensus sequence b1 KRE6 ascomycetes
  VARIANT (2)..(2): Xaa can be any naturally occurring amino acid
  VARIANT (4)..(22): Xaa can be any naturally occurring amino acid
  VARIANT (23)..(24): Xaa can be any naturally occurring amino acid or a gap
  VARIANT (25)..(27): Xaa can be any naturally occurring amino acid
  VARIANT (31)..(32): Xaa can be any naturally occurring amino acid
  VARIANT (34)..(34): Xaa can be any naturally occurring amino acid
  VARIANT (36)..(40): Xaa can be any naturally occurring amino acid
  VARIANT (43)..(46): Xaa can be any naturally occurring amino acid
GXFXXXXXXXXXXXXXXXXXXXXXXXXPFDXXFXLXXXXXVGXXXXWF

SEQ ID NO: 238 - protein, 48 aa, Artificial Sequence
  Consensus sequence b2 KRE6 ascomycetes
  VARIANT (2)..(2): Xaa can be any naturally occurring amino acid
  VARIANT (5)..(5): Xaa can be any naturally occurring amino acid
  VARIANT (7)..(7): Xaa can be any naturally occurring amino acid
  VARIANT (14)..(14): Xaa can be any naturally occurring amino acid
  VARIANT (16)..(16): Xaa can be any naturally occurring amino acid
  VARIANT (23)..(23): Xaa can be any naturally occurring amino acid
  VARIANT (24)..(25): Xaa can be any naturally occurring amino acid or a gap
GXFPXAXANGTRLXDXWSQTGRXXXNTPFDQEFYLILNVAVGGTNGWF

SEQ ID NO: 239 - protein, 235 aa, Artificial Sequence
  Consensus sequence a1 KRE6 basidiomycetes
  VARIANT (5)..(11): Xaa can be any naturally occurring amino acid
  VARIANT (13)..(27): Xaa can be any naturally occurring amino acid
  VARIANT (29)..(31): Xaa can be any naturally occurring amino acid
  VARIANT (41)..(41): Xaa can be any naturally occurring amino acid
  VARIANT (43)..(43): Xaa can be any naturally occurring amino acid
  VARIANT (54)..(54): Xaa can be any naturally occurring amino acid
  VARIANT (58)..(58): Xaa can be any naturally occurring amino acid
  VARIANT (64)..(64): Xaa can be any naturally occurring amino acid
  VARIANT (67)..(68): Xaa can be any naturally occurring amino acid
  VARIANT (71)..(72): Xaa can be any naturally occurring amino acid
  VARIANT (74)..(74): Xaa can be any naturally occurring amino acid
  VARIANT (76)..(77): Xaa can be any naturally occurring amino acid
  VARIANT (79)..(79): Xaa can be any naturally occurring amino acid
  VARIANT (82)..(82): Xaa can be any naturally occurring amino acid
  VARIANT (85)..(89): Xaa can be any naturally occurring amino acid
  VARIANT (91)..(92): Xaa can be any naturally occurring amino acid
  VARIANT (94)..(94): Xaa can be any naturally occurring amino acid
  VARIANT (97)..(97): Xaa can be any naturally occurring amino acid
  VARIANT (111)..(111): Xaa can be any naturally occurring amino acid
  VARIANT (115)..(115): Xaa can be any naturally occurring amino acid
  VARIANT (119)..(120): Xaa can be any naturally occurring amino acid
  VARIANT (124)..(128): Xaa can be any naturally occurring amino acid
  VARIANT (133)..(134): Xaa can be any naturally occurring amino acid
  VARIANT (136)..(137): Xaa can be any naturally occurring amino acid
  VARIANT (146)..(147): Xaa can be any naturally occurring amino acid
  VARIANT (150)..(150): Xaa can be any naturally occurring amino acid
  VARIANT (152)..(152): Xaa can be any naturally occurring amino acid
  VARIANT (158)..(158): Xaa can be any naturally occurring amino acid
  VARIANT (162)..(162): Xaa can be any naturally occurring amino acid
  VARIANT (166)..(166): Xaa can be any naturally occurring amino acid
  VARIANT (171)..(173): Xaa can be any naturally occurring amino acid
  VARIANT (175)..(175): Xaa can be any naturally occurring amino acid
  VARIANT (180)..(181): Xaa can be any naturally occurring amino acid
  VARIANT (183)..(183): Xaa can be any naturally occurring amino acid
  VARIANT (185)..(187): Xaa can be any naturally occurring amino acid
  VARIANT (188)..(193): Xaa can be any naturally occurring amino acid or a gap
  VARIANT (196)..(196): Xaa can be any naturally occurring amino acid
  VARIANT (198)..(198): Xaa can be any naturally occurring amino acid
  VARIANT (201)..(202): Xaa can be any naturally occurring amino acid
  VARIANT (208)..(208): Xaa can be any naturally occurring amino acid
  VARIANT (210)..(211): Xaa can be any naturally occurring amino acid
  VARIANT (216)..(216): Xaa can be any naturally occurring amino acid
  VARIANT (218)..(219): Xaa can be any naturally occurring amino acid
  VARIANT (222)..(222): Xaa can be any naturally occurring amino acid
  VARIANT (229)..(229): Xaa can be any naturally occurring amino acid
  VARIANT (231)..(231): Xaa can be any naturally occurring amino acid
  VARIANT (233)..(235): Xaa can be any naturally occurring amino acid
GQVPXXXXXXXVXXXXXXXXXXXXXXXDXXXYNLVFSDEFXTXGRTFWPGDDPXWEAXDLHYWXTGXXEWXXPXAXXTXNGXLNXXXXXEXXHXLNXRSGMLQSWNKFCFXGGYXEVSXXLPGXXXXXGFWPXXWXXGNLGRAGYXXTTXGXWPYSYXSCDXGTLXNQTNXXXTXPAAAXXAXGXXXXXXXXXLSXLXGQXXSACTCXGXXHPGPXVXXGRXSPEIDIXEXQXXX

SEQ ID NO: 240 - protein, 235 aa, Artificial Sequence
  Consensus sequence a2 KRE6 basisdiomycetes
  VARIANT (41)..(41): Xaa can be any naturally occurring amino acid
  VARIANT (166)..(166): Xaa can be any naturally occurring amino acid
  VARIANT (188)..(193): Xaa can be any naturally occurring amino acid or a gap
  VARIANT (219)..(219): Xaa can be any naturally occurring amino acid
GQVPLIHNLAGVIDPTTPDSVMSRKGFDGTQYNLVFSDEFXTDGRTFWPGDDPYWEAVDLHYWATGNLEWFDPDAITTNNGNLNITITKELIHDLNYRSGMLQSWNKFCFTGGYIEVSISLPGSPRISGFWPGAWTMGNLGRAGYGATTDGTWPYSYNSCDLGTLXNQTNVAKTGPAAALRAPGGGSXXXXXXLSFLPGQKLSSCTCPGGDHPGPNVKXGRGSPEIDIIEAQVTA

SEQ ID NO: 241 - protein, 170 aa, Artificial Sequence
  Consensus sequence b1 KRE6 basidiomycetes
  VARIANT (2)..(2): Xaa can be any naturally occurring amino acid
  VARIANT (7)..(7): Xaa can be any naturally occurring amino acid
  VARIANT (9)..(9): Xaa can be any naturally occurring amino acid
  VARIANT (14)..(15): Xaa can be any naturally occurring amino acid
  VARIANT (17)..(17): Xaa can be any naturally occurring amino acid
  VARIANT (19)..(22): Xaa can be any naturally occurring amino acid
  VARIANT (23)..(23): Xaa can be any naturally occurring amino acid or a gap
  VARIANT (24)..(34): Xaa can be any naturally occurring amino acid
  VARIANT (36)..(36): Xaa can be any naturally occurring amino acid
  VARIANT (38)..(38): Xaa can be any naturally occurring amino acid
  VARIANT (41)..(41): Xaa can be any naturally occurring amino acid
  VARIANT (48)..(54): Xaa can be any naturally occurring amino acid
  VARIANT (57)..(60): Xaa can be any naturally occurring amino acid
  VARIANT (62)..(86): Xaa can be any naturally occurring amino acid or a gap
  VARIANT (87)..(91): Xaa can be any naturally occurring amino acid
  VARIANT (94)..(102): Xaa can be any naturally occurring amino acid
  VARIANT (104)..(107): Xaa can be any naturally occurring amino acid
  VARIANT (109)..(109): Xaa can be any naturally occurring amino acid
  VARIANT (112)..(115): Xaa can be any naturally occurring amino acid
  VARIANT (119)..(122): Xaa can be any naturally occurring amino acid
  VARIANT (126)..(126): Xaa can be any naturally occurring amino acid
  VARIANT (128)..(129): Xaa can be any naturally occurring amino acid
  VARIANT (131)..(132): Xaa can be any naturally occurring amino acid
  VARIANT (134)..(140): Xaa can be any naturally occurring amino acid
  VARIANT (143)..(143): Xaa can be any naturally occurring amino acid
  VARIANT (145)..(145): Xaa can be any naturally occurring amino acid
  VARIANT (154)..(155): Xaa can be any naturally occurring amino acid
  VARIANT (159)..(159): Xaa can be any naturally occurring amino acid
  VARIANT (160)..(160): Xaa can be any naturally occurring amino acid or a gap
  VARIANT (162)..(162): Xaa can be any naturally occurring amino acid
  VARIANT (164)..(164): Xaa can be any naturally occurring amino acid
  VARIANT (166)..(168): Xaa can be any naturally occurring amino acid
GXASQSXQXAPFDXXYXWXXXXXXXXXXXXXXXXNXYXGGXYQEAVSXXXXXXXTAXXXXGXXXXXXXXXXXXXXXXXXXXXXXXXXXXXXTWXXXXXXXXXNXXXXIXQRXXXXEPMXXXXNLAXSXXFXXVXXXXXXXPAXMXVDYVRVYQXXGQEXXIXCXPXXXPT

SEQ ID NO: 242 - protein, 170 aa, Artificial Sequence
  Consensus sequence b2 KRE6 basidiomycetes
  VARIANT (19)..(19): Xaa can be any naturally occurring amino acid
  VARIANT (23)..(23): Xaa can be any naturally occurring amino acid or a gap
  VARIANT (25)..(25): Xaa can be any naturally occurring amino acid
  VARIANT (31)..(31): Xaa can be any naturally occurring amino acid
  VARIANT (33)..(33): Xaa can be any naturally occurring amino acid
  VARIANT (63)..(67): Xaa can be any naturally occurring amino acid or a gap
  VARIANT (69)..(70): Xaa can be any naturally occurring amino acid or a gap
  VARIANT (72)..(80): Xaa can be any naturally occurring amino acid or a gap
  VARIANT (86)..(86): Xaa can be any naturally occurring amino acid or a gap
  VARIANT (135)..(135): Xaa can be any naturally occurring amino acid
  VARIANT (155)..(155): Xaa can be any naturally occurring amino acid
  VARIANT (160)..(160): Xaa can be any naturally occurring amino acid or a gap
GQASQSVQFAPFDDGYNWXEDGXAXVYNPRXSXINSYKGGIYQEAVSVVSTTDQTAYEATGGXXXXXGXXYXXXXXXXXXGSITWXLGDTATWTMSSSAVGPNPNVQISQRVVSEEPMYIILNLAISEAFQTVDXAHLPTPARMLVDYVRVYQKXGQENXIGCSPKNFPT

SEQ ID NO: 243 - DNA, 33 bp, Artificial Sequence
  Primer CgKRE5NotI-Fw
ccagcggccgcatgggccttgccctgacgctgt

SEQ ID NO: 244 - DNA, 37 bp, Artificial Sequence
  Primer CgKRE5NotI-Rv
cagcggccgcctatagctcatctatgacatgcgtatt

SEQ ID NO: 245 - DNA, 40 bp, Artificial Sequence
  Primer CgKRE6SfiIA-Fw
aaaggccattacggccatggatcaagaccagggctactac

SEQ ID NO: 246 - DNA, 39 bp, Artificial Sequence
  Primer CgKRE6SfiIB-Rv
aaaggccgcctcggccttacaactcttcatcgccgtcac

SEQ ID NO: 247 - DNA, 19 bp, Artificial Sequence
  Primer CgPKRE6-Fw
tcggcagctgaacggaaag

SEQ ID NO: 248 - DNA, 40 bp, Artificial Sequence
  Primer CgP KRE65'-flank-Rv
gtgcaactgacagtcgtacaggtatcgagtggcttggaac

SEQ ID NO: 249 - DNA, 42 bp, Artificial Sequence
  Primer CgTKRE63'-flank-Fw
gtctggagtctcactagcttgcgcggaattggttcacaacgg

SEQ ID NO: 250 - DNA, 20 bp, Artificial Sequence
  Primer CgTKRE6-Rv
cctccgtgcagcatgtaatc

SEQ ID NO: 251 - DNA, 20 bp, Artificial Sequence
  Primer CgPKRE6nest-Fw
agtgccttgagggcacgttg

SEQ ID NO: 252 - DNA, 19 bp, Artificial Sequence
  Primer CgTKRE6nest-Rv
gcaacctcgttcgttagtg

SEQ ID NO: 253 - DNA, 20 bp, Artificial Sequence
  Primer Cg KRE6test-Fw
ttgggaggtggctgaacatc

SEQ ID NO: 254 - DNA, 21 bp, Artificial Sequence
  Primer Cg KRE6test-Rv
acacgtgctcgaagcactagg

SEQ ID NO: 255 - DNA, 20 bp, Artificial Sequence
  Primer CgPKRE5-Fw
tggtctgctctcacctcttg

SEQ ID NO: 256 - DNA, 40 bp, Artificial Sequence
  Primer CgP KRE55'-flank-Rv
gtgcaactgacagtcgtacaaagggctgtcctccaatttc

SEQ ID NO: 257 - DNA, 40 bp, Artificial Sequence
  Primer CgT KRE53'-flank-Fw
gtctggagtctcactagcttctagtcggtctggcttcttg

SEQ ID NO: 258 - DNA, 20 bp, Artificial Sequence
  Primer CgT KRE5-Rv
cgggaaagatgcaagtcctc

SEQ ID NO: 259 - DNA, 39 bp, Artificial Sequence
  Primer Gen1pII99-Fw
tgtacgactgtcagttgcacagcgcgttgttggattaag

SEQ ID NO: 260 - DNA, 42 bp, Artificial Sequence
  Primer Gen1pII99-Rv
aagctagtgagactccagacctcagaagaactcgtcaagaag

SEQ ID NO: 261 - DNA, 30 bp, Artificial Sequence
  Primer Nourse1pNR1-Fw
tgaccggtgcctggatcttcctatagaatc

SEQ ID NO: 262 - DNA, 30 bp, Artificial Sequence
  Primer Nourse2pNR1-Rv
ggtcggcatctactctattcctttgccctc

SEQ ID NO: 263 - DNA, 20 bp, Artificial Sequence
  Primer CgPKRE5nest-Fw
cgaactgtatgctgggtgag

SEQ ID NO: 264 - DNA, 20 bp, Artificial Sequence
  Primer CgTKRE5nest-Rv
gtcaggacacgaacgacaag

SEQ ID NO: 265 - DNA, 20 bp, Artificial Sequence
  Primer Cg KRE5test-Fw
tccagaagcggcctgcttac

SEQ ID NO: 266 - DNA, 20 bp, Artificial Sequence
  Primer Cg KRE5test-Rv
cgtcacattgcctgctgaac

SEQ ID NO: 267 - DNA, 29 bp, Artificial Sequence
  Primer RNAi(KRE5)-Fw
aaactcgagtcatgtcggtgcggacaatc

SEQ ID NO: 268 - DNA, 29 bp, Artificial Sequence
  Primer RNAi(KRE5)-Rv
aaaaagctttctttcaagggcctgccctc

SEQ ID NO: 269 - DNA, 29 bp, Artificial Sequence
  Primer RNAi(KRE5)i-Fw
aaaaggccttctttcaagggcctgccctc

SEQ ID NO: 270 - DNA, 29 bp, Artificial Sequence
  Primer RNAi(KRE5)i-Rv
aaagggccctcatgtcggtgcggacaatc

SEQ ID NO: 271 - DNA, 32 bp, Artificial Sequence
  Primer RNAi(KRE6)SmaI-Fw
tttcccgggttacaactcttcatcgccgtcac

SEQ ID NO: 272 - DNA, 30 bp, Artificial Sequence
  Primer RNAi(KRE6) SmaI-Rv
aaacccgggagatgaccaccgcagacaatg

SEQ ID NO: 273 - DNA, 20 bp, Artificial Sequence
  Primer GenR probe-Fw
agcacgtactcggatggaag

SEQ ID NO: 274 - DNA, 23 bp, Artificial Sequence
  Primer GenR probe-Rv
cctcagaagaactcgtcaagaag

SEQ ID NO: 275 - DNA, 20 bp, Artificial Sequence
  Primer HyhR probe-Fw
tgaactcaccgcgacgtctg

SEQ ID NO: 276 - DNA, 20 bp, Artificial Sequence
  Primer HyhR probe-Rv
gagctgatgctttgggccga

SEQ ID NO: 277 - DNA, 20 bp, Artificial Sequence
  Primer NatR probe-Fw
ctcttgacgacacggcttac

SEQ ID NO: 278 - DNA, 20 bp, Artificial Sequence
  Primer NatR probe-Rv
ggcagggcatgctcatgtag

SEQ ID NO: 279 - DNA, 23 bp, Artificial Sequence
  Primer CgGLS1qRT-Fw
gctactatgacgaatcgggctat

SEQ ID NO: 280 - DNA, 19 bp, Artificial Sequence
  Primer CgGLS1qRT-Rv
gccattgttgccgttgttg

SEQ ID NO: 281 - DNA, 20 bp, artificial
  Primer CgACTqRT-F1
tcctacgagcttcctgacgg

SEQ ID NO: 282 - DNA, 20 bp, Artificial Sequence
  Primer CgACTqRT-R1
ccgctctcaagaccaaggac

SEQ ID NO: 283 - DNA, 20 bp, Artificial Sequence
  Primer CgH3-qRT.F1
cgagatccgtcgctaccaga

SEQ ID NO: 284 - DNA, 21 bp, Artificial Sequence
  Primer CgH3-qRT.R1
ggaggtcggacttgaagtcct

SEQ ID NO: 285 - DNA, 21 bp, Artificial Sequence
  Primer CgITS2-q1
tgaacgcgagctaacttgaca

SEQ ID NO: 286 - DNA, 19 bp, Artificial Sequence
  Primer CgITS2-q2
gggcatcgaagatggagga

SEQ ID NO: 287 - DNA, 31 bp, Artificial Sequence
  Primer CgTKRE5NotI-Rv
tctgcggccgctcagaaagagccggtagaag

SEQ ID NO: 288 - DNA, 29 bp, Artificial Sequence
  Primer CgTKRE6SmaI-Fw
tctcccgggtcagaaagagccggtagaag

SEQ ID NO: 289 - DNA, 29 bp, Artificial Sequence
  Primer CgTKRE6SmaI-Rv
tttcccgggcagggccttacctcgatacc

SEQ ID NO: 290 - DNA, 22 bp, Artificial Sequence
  Primer ZmTerpS10_RT-Fw
cgtggacacatgacggaaagag

SEQ ID NO: 291 - DNA, 24 bp, Artificial Sequencel
  Primer ZmTerpS10_RT-Rv
ctcgctgatctcattctcgtagtg

SEQ ID NO: 292 - DNA, 22 bp, Artificial Sequence
  Primer ZmTerpS07_RT-Fw
tgtacaatgcggctcacatggc

SEQ ID NO: 293 - DNA, 21 bp, Artificial Sequence
  Primer ZmTerpS07_RT-Rv
ctgacctcgcctttgctgatg

SEQ ID NO: 294 - DNA, 22 bp, Artificial Sequence
  Primer ZmTerpS03_RT-Fw
gatgctgcgtcagcgtcagaag

SEQ ID NO: 295 - DNA, 23 bp, Artificial Sequence
  Primer ZmTerpS03_RT-Rv
tcgaagaagtggtcgatgcagag

SEQ ID NO: 296 - DNA, 23 bp, Artificial Sequence
  Primer ZmTerpS02_RT-Fw
gtccgtactttggcggcatcatc

SEQ ID NO: 297 - DNA, 22 bp, Artificial Sequence
  Primer ZmTerpS02_RT-Rv
tccgtttgacgtccgtcgtcag

SEQ ID NO: 298 - DNA, 24 bp, Artificial Sequence
  Primer ZmGluc079_RT-Fw
aggcgccattgctcagacagatag

SEQ ID NO: 299 - DNA, 22 bp, Artificial Sequence
  Primer ZmGluc079_RT-Rv
agcctcgagccattccgtgaag

SEQ ID NO: 300 - DNA, 24 bp, Artificial Sequence
  Primer ZmGluc262_RT-Fw
gtgctcgcatagtcgcatcgttag

SEQ ID NO: 301 - DNA, 22 bp, Artificial Sequence
  Primer ZmGluc262_RT-Rv
cagcagcgccttcatggttgtc

SEQ ID NO: 302 - DNA, 24 bp, Artificial Sequence
  Primer ZmGlucP23_RT-Fw
ctctactagagggcgggtatagag

SEQ ID NO: 303 - DNA, 24 bp, Artificial Sequencel
  Primer ZmGlucP23_RT-Rv
gccgacagaaagacaggagcaaac

SEQ ID NO: 304 - DNA, 21 bp, Artificial Sequence
  Primer ZmGlucP15_RT-Fw
cagtggacgcagcagcacatc

SEQ ID NO: 305 - DNA, 22 bp, Artificial Sequence
  Primer ZmGlucP15_RT-Rv
ggtccgcgtggttcttgaactc

SEQ ID NO: 306 - DNA, 21 bp, Artificial Sequence
  Primer ZmGluc561_RT-Fw
gcggcgtacaacaacaacgtg

SEQ ID NO: 307 - DNA, 23 bp, Artificial Sequence
  Primer ZmGluc561_RT-Rv
tgaacatggcgaacaggtaggtc

SEQ ID NO: 308 - DNA, 21 bp, Artificial Sequence
  Primer ZmGluc714_RT-Fw
ctgcagaagacgctggactac

SEQ ID NO: 309 - DNA, 21 bp, Artificial Sequencel
  Primer ZmGluc714_RT-Rv
gtaggagcagtgggccttgac

SEQ ID NO: 310 - DNA, 21 bp, Artificial Sequence
  Primer ZmGluc678_RT-Fw
ctgttcgagttcgccgacaag

SEQ ID NO: 311 - DNA, 23 bp, Artificial Sequence
  Primer ZmGluc678_RT-Rv
tcgacgacgtagtccaggtactc

SEQ ID NO: 312 - DNA, 21 bp, Artificial Sequence
  Primer ZmGluc782_RT-Fw
ctgcccaccaactccttcttc

SEQ ID NO: 313 - DNA, 22 bp, Artificial Sequence
  Primer ZmGluc782_RT-Rv
ggtggatgtactcgggcatgtc

SEQ ID NO: 314 - DNA, 19 bp, Artificial Sequence
  Primer ZmGluc837_RT-Fw
cttcccggcgaagccgatg

SEQ ID NO: 315 - DNA, 22 bp, Artificial Sequence
  Primer ZmGluc837_RT-Rv
caactacaagtacgcgccgttc

SEQ ID NO: 316 - DNA, 21 bp, Artificial Sequence
  Primer ZmChit633_RT-Fw
gtcaccggctccttcttcaac

SEQ ID NO: 317 - DNA, 22 bp, Artificial Sequence
  Primer ZmChit633_RT-Rv
gctccgggtgtagaagttcttg

SEQ ID NO: 318 - DNA, 22 bp, Artificial Sequence
  Primer ZmPerox182_RT-Fw
cgtcccatcctacgatccaaag

SEQ ID NO: 319 - DNA, 22 bp, Artificial Sequence
  Primer ZmPerox182_RT-Rv
tctcgacagcctcgctgtactc

SEQ ID NO: 320 - DNA, 22 bp, Artificial Sequence
  Primer ZmPerox648_RT-Fw
tccgcctccacttccatgactg

SEQ ID NO: 321 - DNA, 22 bp, artificial
  Primer ZmPerox648_RT-Rv
atcgcgtcgatcacctcgtacc

SEQ ID NO: 322 - DNA, 23 bp, Artificial Sequence
  Primer ZmPerox816_RT-Fw
cgcagctctcggcagatttctac

SEQ ID NO: 323 - DNA, 24 bp, Artificial Sequence
  Primer ZmPerox816_RT-Rv
tcgacgacgcccaagatgatcttc

SEQ ID NO: 324 - DNA, 24 bp, Artificial Sequence
  Primer ZmPerox871_RT-Fw
agttggctaccagccctctgtatg

SEQ ID NO: 325 - DNA, 22 bp, Artificial Sequence
  Primer ZmPerox871_RT-Rv
gacctgtgctgcgttgttatac

SEQ ID NO: 326 - DNA, 23 bp, Artificial Sequence
  Pirmer ZmPerox954_RT-Fw
tggtcaagtaccacgtcgccaag

SEQ ID NO: 327 - DNA, 24 bp, Artificial Sequence
  Primer ZmPerox954_RT-Rv
gacgaagcagtcgtggaagatgag

SEQ ID NO: 328 - DNA, 22 bp, Artificial Sequence
  Primer ZmPerox365_RT-Fw
gagatgacgaccgctcccattg

SEQ ID NO: 329 - DNA, 21 bp, Artificial Sequence
  Primer ZmPerox365_RT-Rv
agcgggcttatgttgcccatc

SEQ ID NO: 330 - DNA, 22 bp, Artificial Sequence
  Primer ZmPerox346_RT-Fw
ttcctgatgccaccaagggttc

SEQ ID NO: 331 - DNA, 23 bp, Artificial Sequence
  Primer ZmPerox346_RT-Rv
gagggcaacgatgtcctgatcac

SEQ ID NO: 332 - DNA, 22 bp, Artificial Sequence
  Primer ZmPerox109_RT-Fw
agggagtacgtccaccgtattg

SEQ ID NO: 333 - DNA, 22 bp, Artificial Sequence
  Primer ZmPerox109_RT-Rv
tggccatcttggtcatggactc

SEQ ID NO: 334 - DNA, 24 bp, Artificial Sequence
  Primer ZmPerox456_RT-Fw
acacaagaagctgtcagagctagg

SEQ ID NO: 335 - DNA, 23 bp, Artificial Sequence
  Primer ZmPerox456_RT-Rv
catgcgacaactgcggtagcaac

SEQ ID NO: 336 - DNA, 23 bp, Artificial Sequence
  Primer ZmPerox731_RT-Fw
cggtgttcgaggtgatgggctac

SEQ ID NO: 337 - DNA, 23 bp, Artificial Sequence
  Primer ZmPerox731_RT-Rv
gcagcagtatgagcgccatgttg

SEQ ID NO: 338 - DNA, 22 bp, Artificial Sequence
  Primer ZmSTKin276_RT-Fw
gcacgttctcctcgtcaaactg

SEQ ID NO: 339 - DNA, 22 bp, Artificial Sequence
  Primer ZmSTKin276_RT-Rv
cagccagccgaagctgattatg

SEQ ID NO: 340 - DNA, 22 bp, Artificial Sequence
  Primer ZmUGT079_RT-Fw
agaaagcaaggcgtggctggac

SEQ ID NO: 341 - DNA, 23 bp, Artificial Sequence
  Primer ZmUGT079_RT-Rv
tgccgtagaggccatcggctatc

SEQ ID NO: 342 - DNA, 24 bp, artificial
  Primer ZmShik590_RT-Fw
tcaggaatccggtgatccttatgc

SEQ ID NO: 343 - DNA, 24 bp, Artificial Sequence
  Primer ZmShik590_RT-Rv
ctctggcatcagcattagcatacg

SEQ ID NO: 344 - DNA, 23 bp, Artificial Sequence
  Primer ZmGermLP1_RT-Fw
aggccatcgccatgacgctcttc

SEQ ID NO: 345 - DNA, 23 bp, Artificial Sequence
  Primer ZmGermLP1_RT-Rv
tgggtgcgaagtttgccttgatg

SEQ ID NO: 346 - DNA, 24 bp, Artificial Sequence
  Primer ZmSTKin99_RT-Fw
gtcccttcgttgctgtgtcttctg

SEQ ID NO: 347 - DNA, 24 bp, Artificial Sequence
  Primer ZmSTKin99_RT-Rv
gaattgtcgcatcgcaccagtttg

SEQ ID NO: 348 - DNA, 24 bp, Artificial Sequence
  Primer ZmSTKin74_RT-Fw
tatcgtccacgtcacgaccgaatg

SEQ ID NO: 349 - DNA, 23 bp, Artificial Sequence
  Primer ZmSTKin74_RT-Rv
cggacctgcctacctttgctaac

SEQ ID NO: 350 - DNA, 23 bp, Artificial Sequence
  Primer ZmSTKin50_RT-Fw
ggcggtgttccagttccagttcc

SEQ ID NO: 351 - DNA, 24 bp, Artificial Sequence
  Primer ZmSTKin50_RT-Rv
ctagctgacaggagagcgcatgac

SEQ ID NO: 352 - DNA, 24 bp, Artificial Sequence
  primer ZmSTKin77_RT-Fw
cctgtttatcggtcggcttcatgg

SEQ ID NO: 353 - DNA, 24 bp, Artificial Sequence
  Primer ZmSTKin77_RT-Rv
aatgttcgactcggcgatcctatg

SEQ ID NO: 354 - DNA, 23 bp, Artificial Sequence
  Primer ZmTFZnfing653_RT-Fw
caagaggctgtgccaggagatcg

SEQ ID NO: 355 - DNA, 24 bp, Artificial Sequence
  Primer ZmTFZnfing653_RT-Rv
cgtcggtgaacttgggatccttgg

SEQ ID NO: 356 - DNA, 23 bp, Artificial Sequence
  Primer ZmWRKY62/149_RT-Fw
gggagattattgtgacgcctgag

SEQ ID NO: 357 - DNA, 24 bp, Artificial Sequence
  Primer ZmWRKY62/149_RT-Rv
cagcttctcgacgaactcggaatc

SEQ ID NO: 358 - DNA, 23 bp, Artificial Sequence
  Primer ZmCelluSynt145_RT-Fw
tgggccttcaccttcgtcatcac

SEQ ID NO: 359 - DNA, 23 bp, Artificial Sequence
  Primer ZmCelluSynt145_RT-Rv
gccagaggtagtagccgtcgaac

SEQ ID NO: 360 - DNA, 24 bp, Artificial Sequence
  Primer ZmCelluSynt8/631_RT-Fw
catcctgctggcctcgatcttctc

SEQ ID NO: 361 - DNA, 23 bp, Artificial Sequence
  Primer ZmCelluSynt8/631_RT-Rv
cagttgcagtccaggccacactc

SEQ ID NO: 362 - DNA, 23 bp, Artificial Sequence
  Primer ZmCelluSynt567_RT-Fw
tctcgaagctgacagggccaacg

SEQ ID NO: 363 - DNA, 24 bp, Artificial Sequence
  Primer ZmCelluSynt567_RT-Rv
aaggaacagcccaatgaacacctc

SEQ ID NO: 364 - DNA, 21 bp, Artificial Sequence
  Primer ZmCalmodul673_RT-Fw
cgcggtgctgtcgtcgctggg

SEQ ID NO: 365 - DNA, 23 bp, Artificial Sequence
  Primer ZmCalmodul673_RT-Rv
atctggcggaactcgcggaagtc

SEQ ID NO: 366 - DNA, 30 bp, Artificial Sequence
  Primer S2264
ctggatcctggtgaccttcaagtggcctca

SEQ ID NO: 367 - DNA, 26 bp, Artificial Sequence
  Primer S2265
gccccggggactgtgaatggggatct

SEQ ID NO: 368 - DNA, 30 bp, Artificial Sequence
  Primer S2266
ctcgatcgtggtgaccttcaagtggcctca

SEQ ID NO: 369 - DNA, 26 bp, Artificial Sequence
  Primer S2267
gcaagcttgactgtgaatggggatct

SEQ ID NO: 370 - DNA, 30 bp, Artificial Sequence
  Primer S2473
ctaagctttggtgaccttcaagtggcctca

SEQ ID NO: 371 - DNA, 26 bp, Artificial Sequence
  Primer S2247
ccgtcgacgactgtgaatggggatct

SEQ ID NO: 372 - protein, 1109 aa, Artificial Sequence
  Consensus sequence KRE5
LLALAAIASPSVNVAMQAAFPAPYLLELLETAAENATAYFPLLDRIASGHFATDELYDFLLLDGHITPEALSTFKLALSLRSAAPRIEAHYQYYTAVEPLDDCWVGYCSLDSLPFDRVLGAILYADPTSFGFHTLSARGSYRLRYRSAPLVSGYGVELLKRTDYIVIDDRALDDEEVADLKPLSSELALGLKAASFILQSEPLDLLKLTQDFPKFSSSIAAHVSEFLEHNRLLPSGINVLWMNGVQLERQIEFTLLDMLRRERKLIGVRLGLSGEAVSLLSHIAADDEPRFDWDEGVIIWLNDLEKDRYWPSLALLQRTYPGQLPVRRDIFNLVVPVDLTEDVLLFVRIPIRFGLVPLTTTAQAKVVYHLLDYGLALIYLSVGPDFIRLLEALDVLSEQRIAWVRLATPVFVNGVIPRENWLMSQRITDLQIQAVYGIDDSWVPFLARRNIFPEDDKLRILDVIDHLFSMPIASSKEWALTVVADLDSGDLLSALFRANPVRLLVHNPSILDLLLAILEFWALFLAAGIPGGLLLNGRVVGPIFDDLLLEYERILPVYALEDLGLDKISPLAAAKITSIALSTISDVPEGIFESATLRISYWNSTHTAIEVGDETASIHIALLNPASEAQRWAPILKVLSELDGVYLKLFLNPKELELPVKRFYRYVLDSRPFDGVAFGLPSEALLTLGMDVPPAWLVAPKESIHDLDNIKLSSIAVDAIYELEILIEGHSRDGPPRGAQLVLGTEKDPHADTIIMANLGYFQFKANPGFYNIQLKGRSEIFIDSIGAGWAPPGDETEVALMSFQGTLYPRLSRKPGEDVLEESVKGLFALLGKAVHADINIFSVASGHLYERMLNIMMVSVMKHTKHTVKFWFIEQFLSPSFKDFIPHMAAEYGFYEMVTYKWPHWLRQQKEKQREIWGYKILFLDVLFPLSLDKVIFVDADQIVRTDMELVNHDLEGAPYGFTPMCDSRTEMEGFRFWKQGYWANYLRGPYHISALYVVDLRRFRQLAAGDRLRQQYHALSADPNSLSNLDQDLPNNMQFLPIHSLPQEWLWCETWCSDESLAKTIDLCNNPQTKEPKLDRARRQVPEWTVYDDEIAALRRRKGEED

SEQ ID NO: 373 - protein, 390 aa, Artificial Sequence
  Consensus sequence KRE6 ascomycotes
TPPTPTSNPFDGIESSTNPFGTPSRPASSGSSSAGFDERRYFHSRRVRKEIEKPWLEKDPKEKWVTIIPIIGILVGLGISGFLIWDGIRSVVKHKYCVLEDFSSGLSVWTKEVVGGFGNGEFETTADENVFIDGLVIKPTLQDLIEVIDLLKDGTCTSCVAATNTTGNTIVPPVKSGRINTKKGATIKYGRVEVVAKLPGDWLWPAIWMMPVDDTYGWPSGEIDIMESRGNNWTYQGGNNIVSSALHWGPDANDAWWRTNNKRQALHTTYSDGFNTFGLEWSQKYLFTYINSRLLQVMYTNFDPMWRGFPAANGTRLDWSQTGRNTPFDQEFYLILNVAVGGTNGWFEDGKSGKPWLDSPAKKDFWARDQWPTWTPMVKVMWQQCGNEEL

SEQ ID NO: 374 - protein, 568 aa, Artificial Sequence
  Consensus sequence KRE6 basidiomycotes
MDTASQIDEASESSAGELSDEKANWAPADNRASVMNAIYSDQNYLSSASYLLGANQRPSAASSYPSFRGSQIDPKSRRSYMEDYQDFDAELEDELHNDDGDDDDDNLGSPKKSLLCGNFSMRGILNMGAVLLLALALVTIFGILPVLTYFGSHRATKQLAVNSGGFNLGGINGSGQVPLIHNLAGVIDPTTPDSVMSRKGFDGTQYNLVFSDEFTDGRTFWPGDDPYWEAVDLHYWATGNLEWFDPDAITTNNGNLNITITKELIHDLNYRSGMLQSWNKFCFTGGYIEVSISLPGSPRISGFWPGAWTMGNLGRAGYGATTDGTWPYSYNSCDLGTLNQTNVAKTGPAAALRAPGGGSLSFLPGQKLSSCTCPGGDHPGPNVKGRGSPEIDIIEAQVTAPGSGNIGQASQSVQFAPFDDGYNWEDGAVYNPRSINSYKGGIYQEAVSVVSTTDQTAYEATGGGYGSITWLGDTATWTMSSSAVGPNPNVQISQRVVSEEPMYIILNLAISEAFQTVDAHLPTPARMLVDYVRVYQKGQENIGCSPKNFPTESYIHIYNPNLTWDQAY

SEQ ID NO: 375 - protein, 525 aa, Diplodia maydis
MSPTGASTPTHHSGVFAGKTRKRFVSYRLRGEYEKPWLEDPKFKRTKYNNYVIYAFVFLGVCAAAVVAFFQIRPAISGPVSASRAPHKVLFLNPDFQICLVYEDAFDQGKLDDTFWNYEVTLDGFGTKSFDWTTTDRSNVYTDEKGLHIVPTLTNETTSITTDQMWNGFTLNLTADGTCTENSAAACVAHSNSTKGDMIPPVRSARINTKGKLGIKYGRVEVVAKLPRGDWLWPAIWMMPTDSVYGEWPRSGEMDIMESRGNGVSYPGGRNVYYTTLHWGPSSVFDSYWKTMAVRTQRRGDFTDAFHTYGLEWTDKYIYMYFDDRLTQVLYTKFHSDRTLWQKGGFSEKSENDTLITDPWSDSNSTTGNAPFDQEFYLILNVAVGARNGWFEPKVMGVVASTELHAASLARARPAGVPPSFSQSLTLLAAQHAWHLGMPCARPGASSSLDTTIVETRFQACPSINSYGPRPTHGSGEPPPPLHPRSPVSESLQSGQPAAAQASYVKNDRCFARTRTLNQPLMQRG

SEQ ID NO: 376 - DNA, 1578 bp, Diplodia maydis
atgagccccactggcgcatcaaccccgacacatcactccggtgttttcgcaggcaagaccaggaaacgctttgtttcataccggcttcgcggagaatatgagaagccatggctggaagatcccaaattcaaacggacaaagtacaacaactatgtgatatatgccttcgtgttcttgggcgtgtgtgctgcagccgtcgtcgccttcttccagatcagacctgcgatatcaggcccagtaagtgcatctcgggctccccacaaggtgctctttctgaacccagatttccagatatgtctcgtatatgaggacgcatttgaccaagggaagctggacgacacattctggaattatgaggtgacccttgatggctttggtacgaaatcctttgactggacaaccacggaccggtccaatgtctacacggacgagaagggcctccacatcgtgccgacgctcacaaatgagaccacctccatcaccacggaccagatgtggaacggcttcaccctcaacctcactgctgatggtacctgcacggagaacagcgccgccgcgtgtgtcgcccactccaactcaaccaagggagacatgatcccacctgtcaggtcagcccggatcaataccaagggtaagctgggcatcaagtacgggagggtcgaggtcgtggccaaactgcccagaggtgactggctctggcccgcaatctggatgatgcccacggactcggtgtatggcgagtggccgaggagcggagagatggacataatggagtcccgcggcaatggagtctcgtacccgggaggccgtaatgtctactataccacactgcactggggcccgagttctgtctttgacagctactggaagaccatggctgtgaggacacagcgccggggagactttaccgatgcctttcacacgtacgggctcgagtggacggacaagtatatctacatgtacttcgacgacaggctcactcaagtcctgtacaccaagttccactcggacagaaccctgtggcaaaaaggaggtttctccgagaagagtgagaacgacacgctcattaccgatccctggtcagattccaatagcaccacgggcaatgcacctttcgatcaggaattctacctcatcctcaatgttgccgtcggggccaggaatgggtggttcgaaccgaaagtaatgggcgttgtggcgtcgacggaactgcatgctgcatcactagctcgagcaaggcctgctggcgtgccgccctccttctcgcaatctttgactctgctggcagcacaacatgcgtggcacctcggaatgccctgtgcgcgcccgggtgcttcgtccagcctggacaccaccatcgtggagacgcgcttccaggcctgcccatccatcaactcgtatggcccgaggcccacgcatggctcgggcgagcccccacccccccttcacccacgcagccccgtctctgagtctctgcaatctggccagcccgctgctgcacaggctagctacgtgaagaatgaccgctgctttgctcgcactcgtaccctcaaccaacccctgatgcagcgtggttaa
